(19) United States
(12) Patent Application Publication
(10) Pub. No.: US 2023/0383311 A1
(43) Pub. Date: Nov. 30, 2023

(54) NON-VIRAL DNA VECTORS AND USES THEREOF FOR EXPRESSING FVIII THERAPEUTICS

(71) Applicant: Generation Bio Co., Cambridge, MA (US)

(72) Inventors: Debra Klatte, Cambridge, MA (US); Russell Monds, Cambridge, MA (US); Luke S. Hamm, Boston, MA (US); Nathaniel Silver, Cambridge, MA (US); Phillip Samayoa, Cambridge, MA (US); Douglas Anthony Kerr, Cambridge, MA (US); Jessica Lynn Keenan, Cambridge, MA (US)

(21) Appl. No.: 18/026,377

(22) PCT Filed: Sep. 16, 2021
(86) PCT No.: PCT/US2021/050715

§ 371 Date: Mar. 15, 2023

Related U.S. Application Data
(60) Provisional application No. 63/132,838, filed on Dec. 31, 2020.
(60) Provisional application No. 63/079,349, filed on Sep. 16, 2020.

(51) Int. Cl. C12N 15/86; C12N 15/67; C07K 14/755; A61P 7/04

(52) U.S. Cl. CPC C12N 15/86; C12N 15/67; C07K 14/755; A61P 7/04; C12N 2750/14143

(57) ABSTRACT

The application describes ceDNA vectors having linear and continuous structure for delivery and expression of a transgene. ceDNA vectors comprise an expression cassette flanked by two ITR sequences, where the expression cassette encodes a transgene encoding FVIII protein. Some ceDNA vectors further comprise cis-regulatory elements, including regulatory switches. Further provided herein are methods and cell lines for reliable gene expression of FVIII protein in vitro, ex vivo and in vivo using the ceDNA vectors. Provided herein are methods and compositions comprising ceDNA vectors useful for the expression of FVIII protein in a cell, tissue or subject, and methods of treatment of diseases with said ceDNA vectors expressing FVIII protein. Such FVIII protein can be expressed for treating disease, e.g., hemophilia A.

### RELATED APPLICATIONS

[0001] This application claims priority to U.S. Provisional Application No. 63/079,349, filed on Sep. 16, 2020, and U.S. Provisional Application No. 63/132,838, filed on Dec. 31, 2020, the contents of each of which are hereby incorporated by reference in their entireties.

### SEQUENCE LISTING

[0002] The instant application contains a Sequence Listing which has been submitted electronically in ASCII format and is hereby incorporated by reference in its entirety. Said ASCII copy, created on Sep. 16, 2021, is named 131698-08220_SL.txt and is 1,915,851 bytes in size.

### TECHNICAL FIELD

[0003] The present disclosure relates to the field of gene therapy, including non-viral vectors for expressing a transgene or isolated polynucleotides in a subject or cell. The disclosure also relates to nucleic acid constructs, promoters, vectors, and host cells including the polynucleotides as well as methods of delivering exogenous DNA sequences to a target cell, tissue, organ or organism. For example, the present disclosure provides methods for using non-viral ceDNA vectors to express FVIII, from a cell, e.g., expressing the FVIII therapeutic protein for the treatment of a subject with a hemophilia A. The methods and compositions can be used e.g., for treating disease by expressing the FVIII in a cell or tissue of a subject in need thereof.

### BACKGROUND

[0004] Gene therapy aims to improve clinical outcomes for patients suffering from either genetic mutations or acquired diseases caused by an aberration in the gene expression profile. Gene therapy includes the treatment or prevention of medical conditions resulting from defective genes or abnormal regulation or expression, e.g., underexpression or overexpression, that can result in a disorder, disease, malignancy, etc. For example, a disease or disorder caused by a defective gene might be treated, prevented or ameliorated by delivery of a corrective genetic material to a patient, or might be treated, prevented or ameliorated by altering or silencing a defective gene, e.g., with a corrective genetic material to a patient resulting in the therapeutic expression of the genetic material within the patient.

[0005] The basis of gene therapy is to supply a transcription cassette with an active gene product (a transgene), e.g., that can result in a positive gain-of-function effect, a negative loss-of-function effect, or another outcome. Such outcomes can be attributed to expression of a therapeutic protein such as an antibody, a functional enzyme, or a fusion protein. Gene therapy can also be used to treat a disease or malignancy caused by other factors. Human monogenic disorders can be treated by the delivery and expression of a normal gene to the target cells. Delivery and expression of a corrective gene in the patient's target cells can be carried out via numerous methods, including the use of engineered viruses and viral gene delivery vectors. Among the many virus-derived vectors available (e.g., recombinant retrovirus, recombinant lentivirus, recombinant adenovirus, and the like), recombinant adeno-associated virus (rAAV) is gaining popularity as a versatile vector in gene therapy.

[0006] Adeno-associated viruses (AAV) belong to the Parvoviridae family and more specifically constitute the dependoparvovirus genus. Vectors derived from AAV (i.e., recombinant AAV (rAVV) or AAV vectors) are attractive for delivering genetic material because (i) they are able to infect (transduce) a wide variety of non-dividing and dividing cell types including myocytes and neurons; (ii) they are devoid of the virus structural genes, thereby diminishing the host cell responses to virus infection, e.g., interferon-mediated responses; (iii) wild-type viruses are considered non-pathologic in humans; (iv) in contrast to wild-type AAV, which are capable of integrating into the host cell genome, replication-deficient AAV vectors lack the rep gene and generally persist as episomes, thus limiting the risk of insertional mutagenesis or genotoxicity; and (v) in comparison to other vector systems, AAV vectors are generally considered to be relatively poor immunogens and therefore do not trigger a significant immune response (see ii), thus gaining persistence of the vector DNA and potentially, long-term expression of the therapeutic transgenes.

[0007] However, there are several major deficiencies in using AAV particles as a gene delivery vector. One major drawback associated with rAAV is its limited viral packaging capacity of about 4.5 kb of heterologous DNA (Dong et al., 1996; Athanasopoulos et al., 2004; Lai et al., 2010), and as a result, use of AAV vectors has been limited to less than 150,000 Da protein coding capacity. The second drawback is that as a result of the prevalence of wild-type AAV infection in the population, candidates for rAAV gene therapy have to be screened for the presence of neutralizing antibodies that eliminate the vector from the patient. A third drawback is related to the capsid immunogenicity that prevents re-administration to patients that were not excluded from an initial treatment. The immune system in the patient can respond to the vector which effectively acts as a “booster” shot to stimulate the immune system generating high titer anti-AAV antibodies that preclude future treatments. Some recent reports indicate concerns with immunogenicity in high dose situations. Another notable drawback is that the onset of AAV-mediated gene expression is relatively slow, given that single-stranded AAV DNA must be converted to double-stranded DNA prior to heterologous gene expression.

[0008] Additionally, conventional AAV virions with capsids are produced by introducing a plasmid or plasmids containing the AAV genome, rep genes, and cap genes (Grimm et al., 1998). However, such encapsidated AAV virus vectors were found to inefficiently transduce certain cell and tissue types and the capsids also induce an immune response.

[0009] Accordingly, use of adeno-associated virus (AAV) vectors for gene therapy is limited due to the single administration to patients (owing to the patient immune response), the limited range of transgene genetic material suitable for delivery in AAV vectors due to minimal viral packaging capacity (about 4.5 kb), and slow AAV-mediated gene expression.

[0010] There is large unmet need for disease-modifying therapies in hemophilia A. Current therapies are burdensome and require, e.g., slow drip intravenous (IV) administrations. First, these Factor VIII injectables do not provide continuous delivery of factors, with trough levels allowing bleeding episodes. Second, there are no approved gene therapies for hemophilia A, and AAV based therapies cannot be used by 25% to 40% of patients due to pre-existing antibodies. AAV can only be administered once, and the resulting Factor VIII levels might not reach clinical significance, or may be supranormal, as dose levels cannot be titrated. Third, many hemophilia A patients cannot utilize these therapies because of the development of neutralizing antibodies to these exogenous, artificial clotting factors.

[0011] Accordingly, there is need in the field for a technology that permits expression of a therapeutic FVIII protein in a cell, tissue or subject for the treatment of hemophilia A.

### BRIEF DESCRIPTION

[0012] The technology described herein relates to methods and compositions for treatment of hemophilia A by expression of Factor VIII (FVIII) protein from a capsid-free (e.g., non-viral) DNA vector with covalently-closed ends (referred to herein as a “closed-ended DNA vector” or a “ceDNA vector”), where the ceDNA vector comprises a FVIII nucleic acid sequence or codon optimized versions thereof. These ceDNA vector can be used to produce FVIII proteins for treatment, monitoring, and diagnosis. The application of ceDNA vectors expressing FVIII to the subject for the treatment of hemophilia A is useful to: (i) provide disease modifying levels of FVIII enzyme, (ii) be minimally invasive in delivery, (iii) be repeatable and dosed-to-effect, (iv) have rapid onset of therapeutic effect, (v) result in sustained expression of corrective FVIII enzyme in the liver, (vi) restore urea cycle function, and/or (vii) be titratable to achieve the appropriate pharmacologic levels of the defective enzyme.

[0013] In embodiments, a ceDNA-vector expressing FVIII is optionally present in a liposome nanoparticle formulation (LNP) for the treatment of hemophilia A. The ceDNA vectors described herein can provide one or more benefits including, but not limited to providing disease modifying levels of FVIII, being minimally invasive in delivery, being repeatable and dosed-to-effect, providing a rapid onset of therapeutic effect, e.g., in some embodiments, within days of therapeutic intervention, providing sustained expression of corrective Factor VIII levels in the circulation, being titratable to achieve the appropriate pharmacologic levels of the defective coagulation factor, and/or providing treatments for other types of hemophilia, including but not limited to Factor VIII deficiency (hemophilia A) or Factor IX deficiency (hemophilia B) or Factor XI deficiency (hemophilia C).

[0014] Accordingly, the disclosure described herein relates to a capsid-free (e.g., non-viral) DNA vector with covalently-closed ends (referred to herein as a “closed-ended DNA vector” or a “ceDNA vector”) comprising a heterogeneous gene encoding FVIII, to permit expression of the FVIII therapeutic protein in a cell (e.g., hepatocytes of a human patient suffering from hemophilia A).

[0015] According to one aspect, the disclosure provides a capsid-free close-ended DNA (ceDNA) vector comprising at least one nucleic acid sequence, e.g., heterologous nucleic acid sequence, between flanking inverted terminal repeats (ITRs), wherein at least one heterologous nucleic acid sequence encodes at least one FVIII protein, wherein the at least one nucleic acid sequence that encodes at least one FVIII protein is selected from any of the sequences in Table 1A (SEQ ID NOs: 71-183, 556 and 626-633).

[0016] In a first aspect, the disclosure provides a capsid-free close-ended DNA (ceDNA) vector comprising at least one nucleic acid sequence between flanking inverted terminal repeats (ITRs), wherein the at least one nucleic acid sequence encodes at least one FVIII protein, wherein the at least one nucleic acid sequence that encodes at least one FVIII protein is selected from a sequence having at least 85%, at least 90%, at least 95%, at least 96%, at least 97%, at least 98%, or least 99% identity to any sequence in Table 1A (SEQ ID NOs: 71-183, 556 and 626-633). According to some embodiments, the at least one nucleic acid sequence that encodes at least one FVIII protein is at least 85%, at least 90%, at least 95%, at least 96%, at least 97%, at least 98%, or least 99% identical to SEQ ID NO: 556. According to some embodiments, the at least one nucleic acid sequence that encodes at least one FVIII protein consists of SEQ ID NO: 556. According to some embodiments, the at least one nucleic acid that encodes at least one FVIII protein comprises SEQ ID NO: 556, wherein SEQ ID NO: 556 further comprises one or more modifications. According to some embodiments, the at least one nucleic acid comprising SEQ ID NO: 556, further comprising one or more modifications comprises or consists of SEQ ID NO: 627. According to some embodiments, the at least one nucleic acid comprising SEQ ID NO: 556, further comprising one or more modifications comprises or consists of SEQ ID NO: 628. According to some embodiments, the at least one nucleic acid comprising SEQ ID NO: 556, further comprising one or more modifications comprises or consists of SEQ ID NO: 628. According to some embodiments, the at least one nucleic acid comprising SEQ ID NO: 556, further comprising one or more modifications comprises or consists of SEQ ID NO: 630. According to some embodiments, the at least one nucleic acid comprising SEQ ID NO: 556, further comprising one or more modifications comprises or consists of SEQ ID NO: 631. According to some embodiments, the at least one nucleic acid comprising SEQ ID NO: 556, further comprising one or more modifications comprises or consists of SEQ ID NO: 632. According to some embodiments, the at least one nucleic acid comprising SEQ ID NO: 556, further comprising one or more modifications comprises or consists of SEQ ID NO: 633.

[0017] In some embodiments, the ceDNA vector comprises a promoter or promoter set operatively linked to the least one nucleic acid sequence that encodes at least one FVIII protein. According to some embodiments, the at least one nucleic acid sequence that encodes at least one FVIII protein is selected from any of the sequences in Table 1A (SEQ ID NOs: 71-183, 556 and 626-633). In some embodiments, the ceDNA vector comprises a promoter selected from the group consisting of human a1 antitrypsin (hAAT) promoter, minimal transthyretin promoter (TTRm), hAAT_core_C06, hAAT_core_C07, hAAT_core_08, hAAT_core_C09, hAAT_core_C10, and hAAT_core_truncated. In some embodiments, the ceDNA vector comprises a promoter selected from a nucleic acid sequence having at least 85%, at least 90%, at least 95%, at least 96%, at least 97%, at least 98%, or least 99% identity to any one of SEQ ID NOs: 210-217. In some embodiments, the promoter set comprises a synthetic liver specific promoter set including enhancers and a core promoter, without a 5pUTR. In some embodiments, the promoter set is selected from a nucleic acid sequence having at least 85%, at least 90%, at least 95%, at least 96%, at least 97%, at least 98%, or least 99% identity to any one of SEQ ID NOs: 184-197, 400, 401, 484, and 617-624.

[0018] According to some embodiments, the at least one nucleic acid sequence that encodes the at least one FVIII protein is selected from any of the sequences in Table 1A (SEQ ID NOs: 71-183, 556 and 626-633) and the promoter set is selected from a nucleic acid sequence having at least 85%, at least 90%, at least 95%, at least 96%, at least 97%, at least 98%, or least 99% identity to any one of SEQ ID NOs: 184-197, 400, 401, 484, and 617-624. According to some embodiments, the at least one nucleic acid sequence that encodes the at least one FVIII protein is selected from a nucleic acid sequence having at least 85%, at least 90%, at least 95%, at least 96%, at least 97%, at least 98%, or least 99% identity to any one of SEQ ID NOs: 556 or 626-633 and the promoter set is selected from a nucleic acid sequence having at least 85%, at least 90%, at least 95%, at least 96%, at least 97%, at least 98%, or least 99% identity to any one of SEQ ID NOs: 184-197, 400, 401, 484, and 617-624.

[0019] In some embodiments, the ceDNA vector comprises an enhancer. In some embodiments, the enhancer is selected from the group consisting of: a Serpin enhancer (SerpEnh), the transthyretin (TTRe) gene enhancer (TTRe), the Hepatic Nuclear Factor 1 binding site (HNF1), Hepatic Nuclear Factor 4 binding site (HNF4), Human apolipoprotein E/C-I liver specific enhancer (ApoE_Enh), the enhancer region from Pro-albumin gene (ProEnh), a CpG minimized version of the ApoE_Enh (Human apolipoprotein E/C-I liver specific enhancer) (ApoE_Enh_C03, ApoE_Enh_C04, ApoE_Enh_C09, and ApoE_Enh_C10), and Hepatic nuclear factor enhancer array embedded in GE-856 (Embedded_enhancer_HNF_array). In some embodiments, the Serpin enhancer comprises a nucleic acid sequence at least 85%, at least 90%, at least 95%, at least 96%, at least 97%, at least 98%, or least 99% identical to SEQ ID NO: 198. In some embodiments, the enhancer is selected from a nucleic acid sequence set forth in Table 7 (SEQ ID NOs: 198-209, 485 and 557-616). In some embodiments, the enhancer is selected from a nucleic acid sequence having at least 85%, at least 90%, at least 95%, at least 96%, at least 97%, at least 98%, or least 99% identity to any sequence in Table 7 (SEQ ID NOs: 198-209, 485 and 557-616).

[0020] According to some embodiments, the at least one nucleic acid sequence that encodes the at least one FVIII protein is selected from any of the sequences in Table 1A (SEQ ID NOs: 71-183, 556 and 626-633) and the enhancer is selected from a nucleic acid sequence having at least 85%, at least 90%, at least 95%, at least 96%, at least 97%, at least 98%, or least 99% identity to any one of SEQ ID NOs: 198-209, 485 and 557-616. According to some embodiments, the at least one nucleic acid sequence that encodes the at least one FVIII protein is selected from a nucleic acid sequence having at least 85%, at least 90%, at least 95%, at least 96%, at least 97%, at least 98%, or least 99% identity to any one of SEQ ID NOs: 556 or 626-633 and the enhancer is selected from a nucleic acid sequence having at least 85%, at least 90%, at least 95%, at least 96%, at least 97%, at least 98%, or least 99% identity to any one of SEQ ID NOs: 557-616.

[0021] In some embodiments, the ceDNA vector comprises a 5′ UTR sequence. In some embodiments, the 5′ UTR sequence is selected from a sequence having at least 85% identity to any sequence in Table 10. In some embodiments, the ceDNA vector comprises an intron sequence. In some embodiments, the intron sequence is selected from a sequence having at least 85% identity to any sequence in Table 11. In some embodiments, the ceDNA vector comprises an exon sequence. In some embodiments, the exon sequence is selected from a sequence having at least 85% identity to any sequence in Table 12. In some embodiments, the ceDNA vector comprises a 3′ UTR sequence. In some embodiments, the exon sequence is selected from a sequence having at least 85% identity to any sequence in Table 13. In some embodiments, the ceDNA vector comprises at least one poly A sequence. In some embodiments, the ceDNA vector comprises one or more DNA nuclear targeting sequences (DTS). In some embodiments, the DTS is selected from a sequence having at least 85% identity to any sequence in Table 14. In some embodiments, the ceDNA vector comprises one or more of the following Ubiquitous Chromatin-opening Elements (UCOEs), Kozak sequences, spacer sequences or leader sequences.

[0022] In one embodiment of any of the foregoing aspects of embodiments, at least one nucleic acid sequence is cDNA.

[0023] In one embodiment of any of the foregoing aspects of embodiments, at least one ITR comprises a functional terminal resolution site and a Rep binding site.

[0024] In one embodiment of any of the foregoing aspects of embodiments, one or both of the ITRs are from a virus selected from a parvovirus, a dependovirus, and an adeno-associated virus (AAV). In some embodiments, the flanking ITRs are symmetric or asymmetric. In some embodiments, the flanking ITRs are symmetrical or substantially symmetrical. In some embodiments, the flanking ITRs are asymmetric. In some embodiments, one or both of the ITRs are wild-type, or wherein both of the ITRs are wild-type. In some embodiments, the flanking ITRs are from different viral serotypes. In some embodiments, the flanking ITRs are from the same viral serotypes. In some embodiments, the flanking ITRs are from a pair of viral serotypes shown in Table 6 of International Publication No. WO/2019/161059 (incorporated by reference in its entirety herein). In some embodiments, one or both of the ITRs comprises a sequence selected from the sequences in Table 2, Table 4A, Table 4B, or Table 5. In some embodiments, at least one of the ITRs is altered from a wild-type AAV ITR sequence by a deletion, addition, or substitution that affects the overall three-dimensional conformation of the ITR. In some embodiments, one or both of the ITRs are derived from an AAV serotype selected from AAV1, AAV2, AAV3, AAV4, AAV5, AAV6, AAV7, AAV8, AAV9, AAV10, AAV11, and AAV12. In some embodiments, one or both of the ITRs are synthetic. In some embodiments, one or both of the ITRs is not a wild-type ITR, or wherein both of the ITRs are not wild-type. In some embodiments, one or both of the ITRs is modified by a deletion, insertion, and/or substitution in at least one of the ITR regions selected from A, A′, B, B′, C, C′, D, and D′. In some embodiments, the deletion, insertion, and/or substitution results in the deletion of all or part of a stem-loop structure normally formed by the A, A′, B, B′ C, or C′ regions. In some embodiments, one or both of the ITRs are modified by a deletion, insertion, and/or substitution that results in the deletion of all or part of a stem-loop structure normally formed by the B and B′ regions. In some embodiments, one or both of the ITRs are modified by a deletion, insertion, and/or substitution that results in the deletion of all or part of a stem-loop structure normally formed by the C and C′ regions. In some embodiments, one or both of the ITRs are modified by a deletion, insertion, and/or substitution that results in the deletion of part of a stem-loop structure normally formed by the B and B′ regions and/or part of a stem-loop structure normally formed by the C and C′ regions. In some embodiments, one or both of the ITRs comprise a single stem-loop structure in the region that normally comprises a first stem-loop structure formed by the B and B′ regions and a second stem-loop structure formed by the C and C′ regions. In some embodiments, one or both of the ITRs comprise a single stem and two loops in the region that normally comprises a first stem-loop structure formed by the B and B′ regions and a second stem-loop structure formed by the C and C′ regions. In some embodiments, one or both of the ITRs comprise a single stem and a single loop in the region that normally comprises a first stem-loop structure formed by the B and B′ regions and a second stem-loop structure formed by the C and C′ regions. In some embodiments, both ITRs are altered in a manner that results in an overall three-dimensional symmetry when the ITRs are inverted relative to each other. In some embodiments, one or both of the ITRs comprises a nucleic acid sequence selected from the sequences in Tables 2, 4A, 4B, and 5.

[0025] In some embodiments of any of the above aspects or embodiments, the ceDNA vector comprises a nucleic acid sequence selected from a sequence having at least 85% identity, at least 90% identity, at least 91%, at least 92%, at least 93%, at least 94%, at least 95%, at least 96%, at least 97%, at least 98%, at least 99% or at least 100% identity with a sequence in Table 18 (e.g., any one of SEQ ID NOs: 1-70, 442-483, or 642-646).

[0026] In another aspect, the disclosure provides a method of expressing an FVIII protein in a cell comprising contacting the cell with the ceDNA vector of any one of the aspects or embodiments herein. In some embodiments, the cell is a photoreceptor or a RPE cell. In some embodiments, the cell in in vitro or in vivo. In some embodiments of any of the above aspects or embodiments, the at least one nucleic acid sequence is codon optimized for expression in the eukaryotic cell. In some embodiments of any of the above aspects or embodiments, the at least one nucleic acid sequence is a sequence having at least 85%, at least 90%, at least 95%, at least 96%, at least 97%, at least 98%, or least 99% identity to any sequence set forth in Table 1A (e.g., any one of SEQ ID NOs: 71-183, 556 and 626-633).

[0027] In another aspect, the disclosure provides a method of treating a subject with hemophilia A, comprising administering to the subject a ceDNA vector of any one of the aspects or embodiments herein, wherein at least one nucleic acid sequence encodes at least one FVIII protein.

[0028] In another aspect, the disclosure provides a method of treating a subject with hemophilia A, comprising administering to the subject a nucleic acid sequence selected from a sequence having at least 85%, at least 90%, at least 95%, at least 96%, at least 97%, at least 98%, or least 99% identity with a sequence in Table 18 (e.g., any one of SEQ ID NOs: 1-70, 442-483, or 642-646). According to one embodiment, the nucleic acid sequence is at least 85% identical, at least 90% identical, at least 91% identical, at least 92% identical, at least 93% identical, at least 94% identical, at least 95% identical, at least 96% identical, at least 96% identical, at least 97% identical, at least 98% identical or at least 99% identical to SEQ ID NO: 5. In one embodiment, the nucleic acid sequence comprises SEQ ID NO: 5. In another embodiment, the nucleic acid sequence consists of SEQ ID NO: 5. In some embodiments of any of the above aspects or embodiments, the ceDNA vector comprises a nucleic acid sequence selected from a sequence having at least 85% identity, at least 90% identity, at least 91%, at least 92%, at least 93%, at least 94%, at least 95%, at least 96%, at least 97%, at least 98%, at least 99% or 100% identity with SEQ ID NO: 42. In some embodiments, the ceDNA comprises a nucleic acid sequence consisting of SEQ ID NO: 42.

[0029] In another aspect, the disclosure provides a method of treating a subject with hemophilia B, comprising administering to the subject a nucleic acid sequence selected from a sequence having at least 85% identity, at least 90% identity, at least 91%, at least 92%, at least 93%, at least 94%, at least 95%, at least 96%, at least 97%, at least 98%, at least 99% or at least 100% identity with a sequence in Table 18 (e.g., any one of SEQ ID NOs: 1-70, 442-483, or 642-646).

[0030] In some embodiments of any of the above aspects or embodiments, levels of FVIII in the serum of the subject are increased in subjects administered the ceDNA vector compared to a control. In some embodiments, the increase in levels of FVIII is greater than about 40% compared to the control. In some embodiments, the at least one nucleic acid sequence is a sequence having at least 85% identity, at least 90%, at least 95%, at least 96%, at least 97%, at least 98%, or least 99% to any sequence set forth in Table 1A (e.g., any one of SEQ ID NOs: 71-183, 556 and 626-633) or Table 18 (e.g., any one of SEQ ID NOs: 1-70, 442-483, or 642-646). According to one embodiment, the nucleic acid sequence is at least 85% identical, at least 90% identical, at least 91% identical, at least 92% identical, at least 93% identical, at least 94% identical, at least 95% identical, at least 96% identical, at least 96% identical, at least 97% identical, at least 98% identical or at least 99% identical to SEQ ID NO: 5. According to one embodiment, the nucleic acid sequence comprises SEQ ID NO:5 or consists of SEQ ID NO: 5.

[0031] In some embodiments of the foregoing aspect or embodiments, a level of FVIII in the plasma of the subject is increased in the subject after administration. In some embodiments, the level of FVIII in the plasma of the subject is increased by at least about 20%, 30%, 40%, 50%, 60%, 70%, 80%, 90%, 100%, 2-fold, 2.5-fold, 3-fold, 3.5-fold, 4-fold, 5-fold, 10-fold, 15-fold, 20-fold, 25-fold, 30-fold, 40-fold, 50-fold, 60-fold, 70-fold, 80-fold, 90-fold, or 100-fold after administration. In some embodiments, a level of FVIII in the serum of the subject is increased in the subject administered the ceDNA vector as compared to a control. In some embodiments, the increase in the level of FVIII in the serum of the subject is greater than about 40%, 50%, 60%, 70%, 80%, 90%, 100%, 2-fold, 2.5-fold, 3-fold, 3.5-fold, 4-fold, 5-fold, 10-fold, 15-fold, 20-fold, 25-fold, 30-fold, 40-fold, 50-fold, 60-fold, 70-fold, 80-fold, 90-fold, or 100-fold compared to the control. In some embodiments, the control is a level of FVIII in the serum of the subject prior to administration, or wherein the control is a level of FVIII in the serum of a subject having hemophilia A who did not receive the administration.

[0032] In some embodiments, the ceDNA vector is administered at a dose of about 0.1 mg/kg, 0.2 mg/kg, 0.3 mg/kg, 0.4 mg/kg, 0.5 mg/kg, 0.75 mg/kg, 1 mg/kg, 1.5 mg/kg, 2 mg/kg, 2.5 mg/kg, 3 mg/kg, 3.5 mg/kg, 4 mg/kg, 5 mg/kg, 6 mg/kg, 7 mg/kg, 8 mg/kg, 9 mg/kg, or 10 mg/kg. In some embodiments, the ceDNA vector is administered at a dose of about 0.1 mg/kg to about 20 mg/kg. In some embodiments, the ceDNA vector is administered at a dose of about 0.1 mg/kg to about 15 mg/kg. In some embodiments, the ceDNA vector is administered at a dose of about 0.1 mg/kg to about 10 mg/kg. In some embodiments, the ceDNA vector is administered at a dose of about 0.1 mg/kg to about 5 mg/kg. In some embodiments, the ceDNA vector is administered at a dose of about 0.1 mg/kg to about 0.5 mg/kg. In some embodiments, the ceDNA vector is administered at a dose of about 0.5 mg/kg to about 20 mg/kg. In some embodiments, the ceDNA vector is administered at a dose of about 0.5 mg/kg to about 15 mg/kg. In some embodiments, the ceDNA vector is administered at a dose of about 0.5 mg/kg to about 10 mg/kg. In some embodiments, the ceDNA vector is administered at a dose of about 0.5 mg/kg to about 5 mg/kg. In some embodiments, the ceDNA vector is administered at a dose of about 1 mg/kg to about 20 mg/kg. In some embodiments, the ceDNA vector is administered at a dose of about 1 mg/kg to about 15 mg/kg. In some embodiments, the ceDNA vector is administered at a dose of about 1 mg/kg to about 10 mg/kg. In some embodiments, the ceDNA vector is administered at a dose of about 1 mg/kg to about 5 mg/kg. In some embodiments, the ceDNA vector is administered at a dose of about 5 mg/kg to about 20 mg/kg. In some embodiments, the ceDNA vector is administered at a dose of about 5 mg/kg to about 15 mg/kg. In some embodiments, the ceDNA vector is administered at a dose of about 5 mg/kg to about 10 mg/kg. In some embodiments, the ceDNA vector is administered at a dose of about 10 mg/kg to about 20 mg/kg. In some embodiments, the ceDNA vector is administered at a dose of about 10 mg/kg to about 15 mg/kg. In some embodiments, the ceDNA vector is administered at a dose of about 15 mg/kg to about 20 mg/kg. In some embodiments, the ceDNA vector is administered at a dose of about 0.5 mg/kg, 0.75 mg/kg, 1 mg/kg, 1.5 mg/kg, 2 mg/kg, 2.5 mg/kg, 3 mg/kg, 3.5 mg/kg, 4 mg/kg, or 5 mg/kg. In some embodiments, the ceDNA vector is administered at a dose of about 0.5 mg/kg, 1 mg/kg, 1.5 mg/kg, 2 mg/kg, 2.5 mg/kg, 3 mg/kg, 3.5 mg/kg, 4 mg/kg, or 5 mg/kg.

[0033] In some embodiments, the administration restores at least about 10%, 15%, 20%, 25%, 30%, 35%, 40%, 45%, 50%, 55%, 60%, 65%, 70%, 75%, 80%, 85%, 90% or 95% of FVIII plasma levels of normal individuals not affected by hemophilia A. In some embodiments, the administration restores at least about 10% of FVIII plasma levels of normal individuals not affected by hemophilia A. In some embodiments, the administration restores at least about 15% of FVIII plasma levels of normal individuals not affected by hemophilia A. In some embodiments, the administration restores at least about 20% of FVIII plasma levels of normal individuals not affected by hemophilia A. In some embodiments, the administration restores at least about 25% of FVIII plasma levels of normal individuals not affected by hemophilia A. In some embodiments, the administration restores at least about 30% of FVIII plasma levels of normal individuals not affected by hemophilia A. In some embodiments, the administration restores at least about 35% of FVIII plasma levels of normal individuals not affected by hemophilia A. In some embodiments, the administration restores at least about 40% of FVIII plasma levels of normal individuals not affected by hemophilia A. In some embodiments, the administration restores at least about 45% of FVIII plasma levels of normal individuals not affected by hemophilia A. In some embodiments, the administration restores at least about 50% of FVIII plasma levels of normal individuals not affected by hemophilia A.

[0034] In some embodiments of any of the above aspects or embodiments, the ceDNA vector is administered to a photoreceptor cell, or an RPE cell, or both.

[0035] In some embodiments of any of the above aspects or embodiments, the ceDNA vector expresses the FVIII protein in a photoreceptor cell, or an RPE cell, or both.

[0036] In some embodiments of any of the above aspects or embodiments, the ceDNA vector is administered by any one or more of subretinal injection, suprachoroidal injection or intravitreal injection.

[0037] In another aspect, the disclosure provides a pharmaceutical composition comprising the ceDNA vector of any one of the aspects or embodiments herein.

[0038] In another aspect, the disclosure provides a cell containing a ceDNA vector of any of the aspects or embodiments herein. In some embodiments, the cell is a photoreceptor cell, or a RPE cell, or both.

[0039] In another aspect, the disclosure provides a composition comprising a ceDNA vector of any of the aspects or embodiments herein, and a lipid. In some embodiments, the lipid is a lipid nanoparticle (LNP). In another aspect, the disclosure provides a composition comprising a ceDNA vector, wherein the ceDNA vector comprises a nucleic acid sequence at least 85% identical, at least 90% identical, at least 91% identical, at least 92% identical, at least 93% identical, at least 94% identical, at least 95% identical, at least 96% identical, at least 96% identical, at least 97% identical, at least 98% identical or at least 99% identical to, comprises, or consists of SEQ ID NO: 5, and a lipid. In another aspect, the disclosure provides a composition comprising a ceDNA vector, wherein the ceDNA vector comprises a nucleic acid sequence at least 85% identical, at least 90% identical, at least 91% identical, at least 92% identical, at least 93% identical, at least 94% identical, at least 95% identical, at least 96% identical, at least 96% identical, at least 97% identical, at least 98% identical or at least 99% identical to, comprises, or consists of SEQ ID NO: 42, and a lipid. In some embodiments, the lipid is an LNP.

[0040] In another aspect, the disclosure provides a kit comprising the ceDNA vector of any of the aspects or embodiments herein, the pharmaceutical composition of any of the aspects or embodiments herein, the cell of any of the aspects or embodiments herein, or the composition of any of the aspects or embodiments herein.

[0041] In another aspect, the disclosure provides capsid-free close-ended DNA (ceDNA) vector comprising at least one nucleic acid sequence between flanking inverted terminal repeats (ITRs), wherein at least one nucleic acid sequence encodes at least one protein, wherein the ceDNA vector comprises a promoter or promoter set operatively linked to the least one nucleic acid sequence that encodes the at least one protein, and wherein the promoter is selected from the group consisting of human a1 antitrypsin (hAAT) promoter, minimal transthyretin promoter (TTRm), hAAT_core_C06, hAAT_core_C07, hAAT_core_08, hAAT_core_C09, hAAT_core_C10, and hAAT_core_truncated. In some embodiments, the promoter is selected from a nucleic acid sequence having at least 85% identity to any one of SEQ ID NOs: 210-217. In some embodiments, the promoter set comprises a synthetic liver specific promoter set including enhancers and core promoter, without 5pUTR. In some embodiments, the promoter set is selected from a nucleic acid sequence having at least 85%, at least 90%, at least 91%, at least 92%, at least 93%, at least 94%, at least 95%, at least 96%, at least 97%, at least 98%, at least 99%, at least 100% identity to, comprises, or consists of any one of SEQ ID NOs: 184-197, 400, 401, 484, and 617-624.

[0042] In some embodiments of any of the aspects or embodiments herein, the ceDNA vector comprises an enhancer. In some embodiments, the enhancer is selected from the group consisting of: a Serpin enhancer (SerpEnh), the transthyretin (TTRe) gene enhancer (TTRe), the Hepatic Nuclear Factor 1 binding site (HNF1), Hepatic Nuclear Factor 4 binding site (HNF4), Human apolipoprotein E/C-I liver specific enhancer (ApoE_Enh), the enhancer region from Pro-albumin gene (ProEnh), a CpG minimized version of the ApoE_Enh (Human apolipoprotein E/C-I liver specific enhancer) (ApoE_Enh_C03, ApoE_Enh_C04, ApoE_Enh_C09, and ApoE_Enh_C10), and Hepatic nuclear factor enhancer array embedded in GE-856 (Embedded_enhancer_HNF_array). In some embodiments, the Serpin enhancer comprises a nucleic acid sequence at least 85% identical to SEQ ID NO: 198. In some embodiments, the enhancer is selected from a nucleic acid sequence having at least 85%, at least 90%, at least 91%, at least 92%, at least 93%, at least 94%, at least 95%, at least 96%, at least 97%, at least 98%, at least 99%, at least 100% identity to, comprises, or consists of any one of SEQ ID NOs: 198-209, 485 and 557-616.

[0043] In another aspect, the disclosure provides a method of expressing a protein in a cell comprising contacting the cell with the ceDNA vector of any of the aspects or embodiments herein. In some embodiments, the cell is a photoreceptor or a RPE cell. In some embodiments, the cell in in vitro or in vivo. In some embodiments of any of the aspects or embodiments herein, the at least one nucleic acid sequence is codon optimized for expression in the eukaryotic cell.

[0044] In some embodiments of any of the aspects or embodiments herein, the at least one nucleic acid sequence that encodes at least one FVIII protein is selected from a nucleic acid sequence having at least 85% identity to any one of SEQ ID NOs: 556 and 626-633, and wherein the ceDNA vector comprises an enhancer, wherein the enhancer is selected from a nucleic acid sequence having at least 85% identity to any one of SEQ ID NOs: 557-616.

[0045] In another aspect, the disclosure provides a DNA vector comprising a nucleic acid sequence at least 85% identical to SEQ ID NOs: 71-183, 556 and 626-633. In some embodiments, the DNA vector comprises an enhancer sequence having at least 95% identity to any one of SEQ ID NOs: 198-209, 485, 557-616. In some embodiments, the DNA vector comprises a SerpEnh sequence having at least 95% identity to any one of SEQ ID NOs: 198 and 557-616. In some embodiments, the DNA vector comprises a SerpEnh sequence having at least 95% identity to any one of SEQ ID NOs: 557-616. In some embodiments, the DNA vector comprises a SerpEnh sequence having at least 95% identity to any one of SEQ ID NOs: 557-568. In some embodiments, the DNA vector comprises a SerpEnh sequence having at least 95% identity to any one of SEQ ID NOs: 569 and 570.

[0046] In some embodiments, wherein the DNA vector comprises a SerpEnh sequence having at least 95% identity to any one of SEQ ID NO: 571. In some embodiments, the DNA vector comprises a SerpEnh sequence having at least 95% identity to any one of SEQ ID NO: 572. In some embodiments, the DNA vector comprises a SerpEnh sequence having at least 95% identity to any one of SEQ ID NO: 611. In some embodiments, the DNA vector comprises a SerpEnh sequence having at least 95% identity to any one of SEQ ID NO: 603.

[0047] In some embodiments of the aspects and embodiments herein, the DNA vector comprises a TTRe sequence. In some embodiments, the TTRe sequence is set forth in SEQ ID NO: 199 or a sequence having at least 95% identity thereof. In some embodiments, the DNA vector comprises a TTR promoter. In some embodiments, the TTR promoter is set forth in SEQ ID NO: 211 or a sequence having 95% identity thereof. In some embodiments, the DNA vector comprises a 5′ untranslated region (5′ UTR) sequence selected from the group consisting of SEQ ID NO: 411, SEQ ID NO: 412, SEQ ID NO: 413, SEQ ID NO: 414, SEQ ID NO: 415, SEQ ID NO: 416, SEQ ID NO: 417, SEQ ID NO: 418, SEQ ID NO: 419, SEQ ID NO: 420, SEQ ID NO: 421, SEQ ID NO: 422, SEQ ID NO: 423, SEQ ID NO: 424, SEQ ID NO: 425, SEQ ID NO: 426, SEQ ID NO: 427, SEQ ID NO: 428, SEQ ID NO: 429, SEQ ID NO: 430, SEQ ID NO: 431, SEQ ID NO: 432, SEQ ID NO: 433, SEQ ID NO: 434, SEQ ID NO: 435, and SEQ ID NO: 436. In some embodiments, the DNA vector comprises an intron sequence selected from the group consisting of SEQ ID NO: 235, SEQ ID NO: 236, SEQ ID NO: 237, SEQ ID NO: 238, SEQ ID NO: 239, SEQ ID NO: 240, SEQ ID NO: 241, SEQ ID NO: 242, SEQ ID NO: 243, SEQ ID NO: 245, SEQ ID NO: 246, SEQ ID NO: 247, and SEQ ID NO: 248. In some embodiments, the DNA vector further comprises an intron sequence having at least 95% identity to SEQ ID NO: 235. In some embodiments, the DNA vector comprises a 3′UTR sequence. In some embodiments, the 3′UTR sequence comprises a WPRE element and/or bGH poly A signal sequence or a sequence having at least 95% identity to any one of SEQ ID NOs: 283-291 and 634. In some embodiments, the DNA vector comprises a mircroRNA (mir) sequence set forth in SEQ ID NO: 543 or a sequence having at least 95% identity thereof. In some embodiments, the DNA vector comprises a spacer sequence selected from a sequence having at least 85% identity to any sequence set forth in Table 15 (SEQ ID NOs:318-332 and 635-641). In some embodiments, the DNA vector comprises at least one ITR flanking 5′ and/or 3′ end of the nucleic acid sequence at least 95% identical to SEQ ID NO:556. In some embodiments, the at least one ITR flanking 5′ and/or 3′ is a wild-type AAV ITR(s). In some embodiments, the DNA vector is a closed-ended DNA (ceDNA). In some embodiments, the DNA vector is a plasmid. In some embodiments, the DNA vector comprises a nucleic acid sequence encoding a single chain (SC) FVIII. In some embodiments, the nucleic acid sequence is set forth in SEQ ID NO: 556 or a sequence having at least 99% identity thereto.

[0048] In another aspect, the disclosure provides a ceDNA vector comprising a nucleic acid sequence of SEQ ID NO: 42 or a nucleic acid sequence at least 85%, 90%, 91%, 92%, 93%, 94%, 95%, 96%, 97%, 98%, or 99% identical to SEQ ID NO: 42.

[0049] In another aspect, the disclosure provides a ceDNA vector comprising a nucleic acid sequence of SEQ ID NO: 642 or a nucleic acid sequence at least 85%, 90%, 91%, 92%, 93%, 94%, 95%, 96%, 97%, 98%, or 99% identical to SEQ ID NO: 642.

[0050] In another aspect, the disclosure provides a ceDNA vector comprising a nucleic acid sequence of SEQ ID NO: 643 or a nucleic acid sequence at least 85%, 90%, 91%, 92%, 93%, 94%, 95%, 96%, 97%, 98%, or 99% identical to SEQ ID NO: 643.

[0051] In another aspect, the disclosure provides a ceDNA vector comprising a nucleic acid sequence of SEQ ID NO: 644 or a nucleic acid sequence at least 85%, 90%, 91%, 92%, 93%, 94%, 95%, 96%, 97%, 98%, or 99% identical to SEQ ID NO: 644.

[0052] In another aspect, the disclosure provides a ceDNA vector comprising a nucleic acid sequence of SEQ ID NO: 645 or a nucleic acid sequence at least 85%, 90%, 91%, 92%, 93%, 94%, 95%, 96%, 97%, 98%, or 99% identical to SEQ ID NO: 645.

[0053] In another aspect, the disclosure provides a ceDNA vector comprising a nucleic acid sequence of SEQ ID NO: 646 or a nucleic acid sequence at least 85%, 90%, 91%, 92%, 93%, 94%, 95%, 96%, 97%, 98%, or 99% identical to SEQ ID NO: 646.

[0054] These and other aspects of the disclosure are described in further detail below.

### DESCRIPTION OF DRAWINGS

[0055] The patent or application file contains at least one drawing executed in color. Copies of this patent or patent application publication with color drawing(s) will be provided by the Office upon request and payment of the necessary fee.

[0056] Embodiments of the present disclosure, briefly summarized above and discussed in greater detail below, can be understood by reference to the illustrative embodiments of the disclosure depicted in the appended drawings. However, the appended drawings illustrate only typical embodiments of the disclosure and are therefore not to be considered limiting of scope, for the disclosure may admit to other equally effective embodiments.

[0057] FIG. 1A provides the T-shaped stem-loop structure of a wild-type left ITR of AAV2 (SEQ ID NO: 52) with identification of A-A′ arm, B-B′ arm, C-C′ arm, two Rep binding sites (RBE and RBE′) and also shows the terminal resolution site (TRS). The RBE contains a series of 4 duplex tetramers that are believed to interact with either Rep 78 or Rep 68. In addition, the RBE′ is also believed to interact with Rep complex assembled on the wild-type ITR or mutated ITR in the construct. The D and D′ regions contain transcription factor binding sites and other conserved structure. FIG. 1A discloses SEQ ID NO: 544. FIG. 1B shows proposed Rep-catalyzed nicking and ligating activities in a wild-type left ITR, including the T-shaped stem-loop structure of the wild-type left ITR of AAV2 with identification of A-A′ arm, B-B′ arm, C-C′ arm, two Rep Binding sites (RBE and RBE′) and also shows the terminal resolution site (TRS), and the D and D′ region comprising several transcription factor binding sites and other conserved structure. FIG. 1B discloses SEQ ID NO: 545.

[0058] FIG. 2A provides the primary structure (polynucleotide sequence) (left) (SEQ ID NO: 547) and the secondary structure (right) (SEQ ID NO: 547) of the RBE-containing portions of the A-A′ arm, and the C-C′ and B-B′ arm of the wild-type left AAV2 ITR. FIG. 2B shows an exemplary mutated ITR (also referred to as a modified ITR) sequence for the left ITR. Shown is the primary structure (left) (SEQ ID NO: 549) and the predicted secondary structure (right) (SEQ ID NO: 549) of the RBE portion of the A-A′ arm, the C arm and B-B′ arm of an exemplary mutated left ITR (ITR-1, left). FIG. 2C shows the primary structure (left) (SEQ ID NO: 550) and the secondary structure (right) (SEQ ID NO: 550) of the RBE-containing portion of the A-A′ loop, and the B-B′ and C-C′ arms of wild-type right AAV2 ITR. FIG. 2D shows an exemplary right modified ITR. Shown is the primary structure (left) (SEQ ID NO: 551) and the predicted secondary structure (right) (SEQ ID NO: 551) of the RBE containing portion of the A-A′ arm, the B-B′ and the C arm of an exemplary mutant right ITR (ITR-1, right). Any combination of left and right ITR (e.g., AAV2 ITRs or other viral serotype or synthetic ITRs) can be used as taught herein. Each of FIGS. 2A-2D polynucleotide sequences refer to the sequence used in the plasmid or bacmid/baculovirus genome used to produce the ceDNA as described herein. Also included in each of FIGS. 2A-2D are corresponding ceDNA secondary structures inferred from the ceDNA vector configurations in the plasmid or bacmid/baculovirus genome and the predicted Gibbs free energy values.

[0059] FIG. 3A is a schematic illustrating an upstream process for making baculovirus infected insect cells (BIICs) that are useful in the production of a ceDNA vector for expression of the FVIII as disclosed herein in the process described in the schematic in FIG. 4B. FIG. 3B is a schematic of an exemplary method of ceDNA production and FIG. 3C illustrates a biochemical method and process to confirm ceDNA vector production. FIG. 3D and FIG. 3E are schematic illustrations describing a process for identifying the presence of ceDNA in DNA harvested from cell pellets obtained during the ceDNA production processes in FIG. 3B. FIG. 3D shows schematic expected bands for an exemplary ceDNA either left uncut or digested with a restriction endonuclease and then subjected to electrophoresis on either a native gel or a denaturing gel. The leftmost schematic is a native gel, and shows multiple bands suggesting that in its duplex and uncut form ceDNA exists in at least monomeric and dimeric states, visible as a faster-migrating smaller monomer and a slower-migrating dimer that is twice the size of the monomer. The schematic second from the left shows that when ceDNA is cut with a restriction endonuclease, the original bands are gone and faster-migrating (e.g., smaller) bands appear, corresponding to the expected fragment sizes remaining after the cleavage. Under denaturing conditions, the original duplex DNA is single-stranded and migrates as a species twice as large as observed on native gel because the complementary strands are covalently linked. Thus, in the second schematic from the right, the digested ceDNA shows a similar banding distribution to that observed on native gel, but the bands migrate as fragments twice the size of their native gel counterparts. The rightmost schematic shows that uncut ceDNA under denaturing conditions migrates as a single-stranded open circle, and thus the observed bands are twice the size of those observed under native conditions where the circle is not open. In this figure “kb” is used to indicate relative size of nucleotide molecules based, depending on context, on either nucleotide chain length (e.g., for the single stranded molecules observed in denaturing conditions) or number of base pairs (e.g., for the double-stranded molecules observed in native conditions). FIG. 3E shows DNA having a non-continuous structure. The ceDNA can be cut by a restriction endonuclease, having a single recognition site on the ceDNA vector, and generate two DNA fragments with different sizes (1 kb and 2 kb) in both neutral and denaturing conditions. FIG. 3E also shows a ceDNA having a linear and continuous structure. The ceDNA vector can be cut by the restriction endonuclease and generate two DNA fragments that migrate as 1 kb and 2 kb in neutral conditions, but in denaturing conditions, the stands remain connected and produce single strands that migrate as 2 kb and 4 kb.

[0060] FIG. 4 is an exemplary picture of a denaturing gel running examples of ceDNA vectors with (+) or without (−) digestion with endonucleases (EcoRI for ceDNA construct 1 and 2; BamH1 for ceDNA construct 3 and 4; SpeI for ceDNA construct 5 and 6; and XhoI for ceDNA construct 7 and 8) Constructs 1-8 are described in Example 1 of International Application PCT PCT/US18/49996, which is incorporated herein in its entirety by reference. Sizes of bands highlighted with an asterisk were determined and provided on the bottom of the picture.

[0061] FIG. 5 is an annotated schematic of the ceDNA1368 construct (6007 bp). FIG. 5 discloses SEQ ID NOS: 8 and 552, respectively, in order of appearance.

[0062] FIG. 6 is an annotated schematic of the ceDNA1652 construct (6250 bp). FIG. 6 discloses SEQ ID NOS: 43 and 552, respectively, in order of appearance.

[0063] FIG. 7 is an annotated schematic of the ceDNA1923 construct (5996 bp). FIG. 7 discloses SEQ ID NO: 68.

[0064] FIG. 8 is an annotated schematic of the ceDNA1373 having an intron inbetween Exon 1 and Exon 2 (i.e., GE-857 “miniF8_500/500” which is a mini Factor VIII intron 1 chimera, 500 nucleotides from 5′-end of intron, 500 nucleotides from 3′-end of intron) and another intron located 5′-UTR between a promoter (TTRm) and the ATG start site (i.e., GE-023 “MVM_intron”). FIG. 8 discloses SEQ ID NO: 51.

[0065] FIG. 9 shows a schematic of FVIII and its domains, as processed to active FVIIIa.

[0066] FIG. 10A and FIG. 10B are schematics detailing insertion of an intron (miniF8_50/100 intron) into FVIII ORF of ceDNA1367. FIG. 10A depicts Chimeric FVIII intron with functional splice donor and acceptor sites is inserted at native position of intron 1 into codon optimized FVIII ORF. FIG. 10B depicts intron flanking regions (33 bp) derived from FVIII Wt cDNA sequence were substituted for codon optimized sequence in FVIII CDS. FIG. 10B discloses SEQ ID NO: 553.

[0067] FIG. 11A and FIG. 11B are schematics detailing insertion of introns into a FVIII ORF. FIG. 11A depicts a chimeric FVIII intron (miniF8_200_5p and miniF8_200_3p) with functional splice donor and acceptor sites inserted at native position of intron 1 into a codon optimized FVIII ORF. FIG. 11B depicts an enhancer element (Embedded_enhancer_HNF_array) inserted inbetween 5p and 3p regions of the chimeric intron. FIG. 11B discloses SEQ ID NO: 554.

[0068] FIG. 12 is a schematic detailing substitution of heterologous secretion signal sequences (N-terminal sequences) for the native FVIII signal sequence. Substitution of the native FVIII signal sequence for a signal sequence from chymotrypsinogen (CHY-SSv1) ORF. FVIII mature peptide is shown at the top. The sequence of FVIII N-terminus signal sequence and mature peptide cleavage site are shown at the bottom. FIG. 12 discloses SEQ ID NOS: 487-490, respectively, in order of appearance.

[0069] FIG. 13 shows a schematic of B-domain selection for the constructs described herein, ranging from a complete B domain deletion (commonly known as BDD-SQ); a B domain having V3 peptide only (known as BDD V3; McIntosh et al., 2013, Blood, 121:3335-3344); a B domain having 226 amino acid with 6 N-linked glycosylation sites (266BD; 226a/N6; see Miao et al., Blood (2004); and a complete B domain deletion in a single chain (SC) in which A2 domain is linked to A3 domain having a slight deletion (4 amino acid of “EITR” (SEQ ID NO: 486)) in its N-terminus of the native A3, known as “Afstyla” style (BDD-SC). FIG. 13 discloses SEQ ID NOS: 491 and 491, respectively, in order of appearance.

[0070] FIG. 14 is a graph that shows a comparison between the chromogenic activity assay versus ELISA to validate the assay method to determine FVIII activity. Various constructs were tested for FVIII activity with the chromogenic assay and the FVIII protein quantity using ELISA. The constructs tested were ceDNA692 (BBD-SQ), ceDNA704 (BDD-V3), ceDNA1270 (226/F309S), ceDNA1368 (SC) and ceDNA1373 (SC/F309S)).

[0071] FIG. 15 depicts FVIII activity in vitro ceDNA (ceDNA692 (BBD-SQ)); ceDNA693 (BBD-SQ); ceDNA694 (BBD-SQ); ceDNA1391 (226/F309S); ceDNA1270 (226/F309S); ceDNA1367 (SC/F309S); ceDNA1373 (SC/F309S); ceDNA1368 (SC); and ceDNA1374 (SC)) and in vivo hydrodynamic injection Study 1 and Study 2 at Day 3 (ceDNA692 (BBD-SQ); ceDNA694 (BBD-SQ); ceDNA933 (226BD/F309S); ceDNA1265; ceDNA1270 (226/F309S); ceDNA1270 repeat (rep); ceDNA1367 (SC/F309S); ceDNA1373 (SC/F309S); ceDNA1368 (SC); and ceDNA1374 (SC)).

[0072] FIG. 16 depicts the results of an in vivo study on FVIII activity at day 11 using constructs ceDNA933 (226BD/F309S), ceDNA1270 (226/F309S), ceDNA1367 (SC/F309S), and ceDNA1368 (SC) formulated in LNP.

[0073] FIG. 17 shows the results of codon optimization on FVIII activity. The FVIII activity was measure from in vivo and in vitro studies using various ceDNA of FVIII SC, codon optimized FVIII sequences (ceDNA1362; ceDNA1368; ceDNA1374; ceDNA1838; ceDNA1840; ceDNA1918; ceDNA1919; ceDNA1920; ceDNA1921; ceDNA1922; and ceDNA1923). Hydrodynamic (HD)

[0074] FIG. 18 shows that codon optimized constructs without F309S mutation: i.e., ceDNA1368 and its variants such as ceDNA1923, ceDNA1823, ceDNA1840 which shows improvements on plasma FVIII concentration (IU/ml). Hydrodynamic (HD)

[0075] FIG. 19 depicts optimization of 3′ untranslated regions (UTR) and their effect on FVIII activity and plasma FVIII.

[0076] FIG. 20 depicts the effect of different promoters and enhancers on FVIII activity.

[0077] FIG. 21 depicts results from in vitro studies showing the effect of different introns on expression of ceDNA FVIII as measured by chromogenic FVIII activity.

[0078] FIG. 22 shows plasma FVIII chromogenic activity (IU/mL) at 11 days after administration of ceDNAFVIII formulated in LNPs in vivo, as measured by the chromogenic assays for FVIII activity (see, Example 12).

[0079] FIG. 23 depicts the effect of different DNA nuclear targeting sequences (DTS) on FVIII activity in vitro and in vivo.

[0080] FIG. 24 depicts the effects of leader sequences on FVIII activity in vitro and in vivo.

[0081] FIG. 25 shows the results from in vivo studies in mice and non-human primates (NHP) using various ceDNA vectors to express FVIII protein, as described in Examples 10, 15 and 16. Results show plasma FVIII concentration (IU/ml). Mouse vehicle: Example 10, PBS, day 5, n=5; Mouse DP #1: Example 10, ceDNA1270 in LNP formulation 1 (Ionizable lipid:DSPC:Cholesterol:PEG-Lipid+DSPE-PEG-GalNAc4 (47.5:10.0:39.2:3.3), 1mpk, day 5, n=4; Mouse DP #2: Example 10, ceDNA1270, LNP formulation 2 (Ionizable lipid:DSPC:Cholesterol:PEG-Lipid+DSPE-PEG2000-GalNAc4 (47.3:10.0:40.5:2.3), 2mpk, day 5, n=5; NHP vehicle: Example 14, saline, day 5, n=2; NHP DP #1: Example 14, ceDNA1270 in LNP formulation 1 (Ionizable lipid:DSPC:Cholesterol:PEG-Lipid+DSPE-PEG-GalNAc4 (47.5:10.0:39.2:3.3), 1mpk, day 5, n=2; NHP DP #2: Example 15, ceDNA 1270 in LNP formulation 2 (Ionizable lipid:DSPC:Cholesterol:PEG-Lipid+DSPE-PEG2000-GalNAc4 (47.3:10.0:40.5:2.3), 2mpk, day 5, n=2.

[0082] FIG. 26 shows the results from in vivo studies in FVIII knockout mice, as described in Example 11. Results show plasma FVIII concentration (IU/ml) at day 10. The following ceDNA constructs were tested at the indicated doses (mg/kg) ceDNA1270, ceDNA1368, ceDNA1923, ceDNA1651. As shown in FIG. 26, after 10 days, mice administered these ceDNA constructs at all of the doses tested showed increases in plasma FVIII concentration. Overall, the increase in FVIII plasma concentration was dose dependent. ceDNA1270 showed a dramatic increase in plasma FVIII concentration from the 0.5 mg/kg dose to the 2.0 mg/kg dose.

[0083] FIG. 27 depicts a chart showing the result of FVIII expression using various spacer variants of 3×hSerpEnh (2-mer and 11-mer) and Serpin enhancer sequence variants (e.g., bushbaby Serpin enhancer, Chinese tree shrew Serpin enhancer). One dose of 50 ng plasmid containing FVIII ceDNA sequence was hydrodynamically injected into the tail vein of Rag2 mice on day 0 with a single blood collection at day 3 (˜72 hr post dose) for FVIII activity.

[0084] FIG. 28 depicts a chart showing the results from an in vivo study in which C57BL/6J mice were hydrodynamically injected with FVIII-ceDNA, and FVIII activity was measured at Day 3 from the serum of the treated mice. The ceDNA constructs were: (1) ceDNA construct 10 (wild-type left ITR:left ITR spacer:3×hSerpEnh VD promoter set:Mouse TTR 5′UTR: MVM Intron: hFVIII-F309S_BD226seq124-BDD-F309 ORF which is identical to the ORF sequence of ceDNA 1651): WPRE_3pUTR: bGH: Right ITR Spacer: wild-type right ITR; (2) ceDNA construct 60 which has the identical sequence to ceDNA construct 10 except it contains 3×_hSerpEnh-2mer spacer v17; (3) ceDNA construct 61 which has the identical sequence to ceDNA construct 10 except it contains 3×_SerpEnh_11-mer_spacers_v3; (4) ceDNA construct 62 which has the identical sequence to ceDNA construct 10 except it has 3×_Bushbaby SerpEnh with adenine (A) spacers (“Aspacers”) located at 5′ upstream of the TTR promoter); (5) and ceDNA construct 39 which has the similar sequence to ceDNA construct 10 except that it contains a truncated right ITR).

### DETAILED DESCRIPTION

[0085] Provided herein is a method for treating hemophilia A using a ceDNA vector comprising one or more nucleic acids that encode an FVIII therapeutic protein or fragment thereof. Also provided herein are ceDNA vectors for expression of FVIII protein as described herein comprising one or more nucleic acids, e.g., heterologous nucleic acids that encode for the FVIII protein. In some embodiments, the expression of FVIII protein can comprise secretion of the therapeutic protein out of the cell in which it is expressed. Alternatively, in some embodiments, the expressed FVIII protein can act or function (e.g., exert its effect) within the cell in which it is expressed. In some embodiments, the ceDNA vector expresses FVIII protein in the liver, in a muscle (e.g., a skeletal muscle) of a subject, or in another body part, which can act as a depot for FVIII therapeutic protein production and secretion to many systemic compartments.

### I. Definitions

[0086] Unless otherwise defined herein, scientific and technical terms used in connection with the present application shall have the meanings that are commonly understood by those of ordinary skill in the art to which this disclosure belongs. It should be understood that this disclosure is not limited to the particular methodology, protocols, and reagents, etc., described herein and as such can vary. The terminology used herein is for the purpose of describing particular embodiments only and is not intended to limit the scope of the present disclosure, which is defined solely by the claims. Definitions of common terms in immunology and molecular biology can be found in The Merck Manual of Diagnosis and Therapy, 19th Edition, published by Merck Sharp & Dohme Corp., 2011 (ISBN 978-0-911910-19-3); Robert S. Porter et al. (eds.), Fields Virology, 6^{th} Edition, published by Lippincott Williams & Wilkins, Philadelphia, PA, USA (2013), Knipe, D. M. and Howley, P. M. (ed.), The Encyclopedia of Molecular Cell Biology and Molecular Medicine, published by Blackwell Science Ltd., 1999-2012 (ISBN 9783527600908); and Robert A. Meyers (ed.), Molecular Biology and Biotechnology: a Comprehensive Desk Reference, published by VCH Publishers, Inc., 1995 (ISBN 1-56081-569-8); Immunology by Werner Luttmann, published by Elsevier, 2006; Janeway's Immunobiology, Kenneth Murphy, Allan Mowat, Casey Weaver (eds.), Taylor & Francis Limited, 2014 (ISBN 0815345305, 9780815345305); Lewin's Genes XI, published by Jones & Bartlett Publishers, 2014 (ISBN-1449659055); Michael Richard Green and Joseph Sambrook, Molecular Cloning: A Laboratory Manual, 4^{th} ed., Cold Spring Harbor Laboratory Press, Cold Spring Harbor, N.Y., USA (2012) (ISBN 1936113414); Davis et al., Basic Methods in Molecular Biology, Elsevier Science Publishing, Inc., New York, USA (2012) (ISBN 044460149X); Laboratory Methods in Enzymology: DNA, Jon Lorsch (ed.) Elsevier, 2013 (ISBN 0124199542); Current Protocols in Molecular Biology (CPMB), Frederick M. Ausubel (ed.), John Wiley and Sons, 2014 (ISBN047150338X, 9780471503385), Current Protocols in Protein Science (CPPS), John E. Coligan (ed.), John Wiley and Sons, Inc., 2005; and Current Protocols in Immunology (CPI) (John E. Coligan, ADA M Kruisbeek, David H Margulies, Ethan M Shevach, Warren Strobe, (eds.) John Wiley and Sons, Inc., 2003 (ISBN 0471142735, 9780471142737), the contents of which are all incorporated by reference herein in their entireties.

[0087] As used herein, the terms, “administration,” “administering” and variants thereof refers to introducing a composition or agent (e.g., a therapeutic nucleic acid or an immunosuppressant as described herein) into a subject and includes concurrent and sequential introduction of one or more compositions or agents. “Administration” can refer, e.g., to therapeutic, pharmacokinetic, diagnostic, research, placebo, and experimental methods. “Administration” also encompasses in vitro and ex vivo treatments. The introduction of a composition or agent into a subject is by any suitable route, including orally, pulmonarily, intranasally, parenterally (intravenously, intramuscularly, intraperitoneally, or subcutaneously), rectally, intralymphatically, intratumorally, or topically. The introduction of a composition or agent into a subject is by electroporation. Administration includes self-administration and the administration by another. Administration can be carried out by any suitable route. A suitable route of administration allows the composition or the agent to perform its intended function. For example, if a suitable route is intravenous, the composition is administered by introducing the composition or agent into a vein of the subject.

[0088] As used herein, the phrases “nucleic acid therapeutic”, “therapeutic nucleic acid” and “TNA” are used interchangeably and refer to any modality of therapeutic using nucleic acids as an active component of therapeutic agent to treat a disease or disorder. As used herein, these phrases refer to RNA-based therapeutics and DNA-based therapeutics. Non-limiting examples of RNA-based therapeutics include mRNA, antisense RNA and oligonucleotides, ribozymes, aptamers, interfering RNAs (RNAi), Dicer-substrate dsRNA, small hairpin RNA (shRNA), asymmetrical interfering RNA (aiRNA), microRNA (miRNA). Non-limiting examples of DNA-based therapeutics include minicircle DNA, minigene, viral DNA (e.g., Lentiviral or AAV genome) or non-viral synthetic DNA vectors, closed-ended linear duplex DNA (ceDNA/CELiD), plasmids, bacmids, doggybone (dbDNA™) DNA vectors, minimalistic immunological-defined gene expression (MIDGE)-vector, nonviral ministring DNA vector (linear-covalently closed DNA vector), or dumbbell-shaped DNA minimal vector (“dumbbell DNA”).

[0089] As used herein, an “effective amount” or “therapeutically effective amount” of a therapeutic agent, such as a FVIII therapeutic protein or fragment thereof, is an amount sufficient to produce the desired effect, e.g., treatment or prevention of hemophilia A. Suitable assays for measuring expression of a target gene or target sequence include, e.g., examination of protein or RNA levels using techniques known to those of skill in the art such as dot blots, northern blots, in situ hybridization, ELISA, immunoprecipitation, enzyme function, as well as phenotypic assays known to those of skill in the art. However, dosage levels are based on a variety of factors, including the type of injury, the age, weight, sex, medical condition of the patient, the severity of the condition, the route of administration, and the particular active agent employed. Thus, the dosage regimen may vary widely, but can be determined routinely by a physician using standard methods. Additionally, the terms “therapeutic amount”, “therapeutically effective amounts” and “pharmaceutically effective amounts” include prophylactic or preventative amounts of the compositions of the described disclosure. In prophylactic or preventative applications of the described disclosure, pharmaceutical compositions or medicaments are administered to a patient susceptible to, or otherwise at risk of, a disease, disorder or condition in an amount sufficient to eliminate or reduce the risk, lessen the severity, or delay the onset of the disease, disorder or condition, including biochemical, histologic and/or behavioral symptoms of the disease, disorder or condition, its complications, and intermediate pathological phenotypes presenting during development of the disease, disorder or condition. It is generally preferred that a maximum dose be used, that is, the highest safe dose according to some medical judgment. According to some embodiments, the disease, disorder or condition is hemophilia A. The terms “dose” and “dosage” are used interchangeably herein.

[0090] As used herein the term “therapeutic effect” refers to a consequence of treatment, the results of which are judged to be desirable and beneficial. A therapeutic effect can include, directly or indirectly, the arrest, reduction, or elimination of a disease manifestation. A therapeutic effect can also include, directly or indirectly, the arrest reduction or elimination of the progression of a disease manifestation.

[0091] For any therapeutic agent described herein therapeutically effective amount may be initially determined from preliminary in vitro studies and/or animal models. A therapeutically effective dose may also be determined from human data. The applied dose may be adjusted based on the relative bioavailability and potency of the administered compound. Adjusting the dose to achieve maximal efficacy based on the methods described above and other well-known methods is within the capabilities of the ordinarily skilled artisan. General principles for determining therapeutic effectiveness, which may be found in Chapter 1 of Goodman and Gilman's The Pharmacological Basis of Therapeutics, 10^{th} Edition, McGraw-Hill (New York) (2001), incorporated herein by reference, are summarized below.

[0092] Pharmacokinetic principles provide a basis for modifying a dosage regimen to obtain a desired degree of therapeutic efficacy with a minimum of unacceptable adverse effects. In situations where the drug's plasma concentration can be measured and related to therapeutic window, additional guidance for dosage modification can be obtained.

[0093] As used herein, the terms “heterologous nucleic acid sequence” and “transgene” are used interchangeably and refer to a nucleic acid of interest (other than a nucleic acid encoding a capsid polypeptide) that is incorporated into and may be delivered and expressed by a ceDNA vector as disclosed herein. In one embodiment, a nucleic acid sequence may be a heterologous nucleic acid sequence. According to some embodiments, the term “heterologous nucleic acid” is meant to refer to a nucleic acid (or transgene) that is not present in, expressed by, or derived from the cell or subject to which it is contacted.

[0094] As used herein, the terms “expression cassette” and “transcription cassette” are used interchangeably and refer to a linear stretch of nucleic acids that includes a transgene that is operably linked to one or more promoters or other regulatory sequences sufficient to direct transcription of the transgene, but which does not comprise capsid-encoding sequences, other vector sequences or inverted terminal repeat regions. An expression cassette may additionally comprise one or more cis-acting sequences (e.g., promoters, enhancers, or repressors), one or more introns, and one or more post-transcriptional regulatory elements.

[0095] The terms “polynucleotide” and “nucleic acid,” used interchangeably herein, refer to a polymeric form of nucleotides of any length, either ribonucleotides or deoxyribonucleotides. Thus, this term includes single, double, or multi-stranded DNA or RNA, genomic DNA, cDNA, DNA-RNA hybrids, or a polymer including purine and pyrimidine bases or other natural, chemically or biochemically modified, non-natural, or derivatized nucleotide bases. “Oligonucleotide” generally refers to polynucleotides of between about 5 and about 100 nucleotides of single- or double-stranded DNA. However, for the purposes of this disclosure, there is no upper limit to the length of an oligonucleotide. Oligonucleotides are also known as “oligomers” or “oligos” and may be isolated from genes, or chemically synthesized by methods known in the art. The terms “polynucleotide” and “nucleic acid” should be understood to include, as applicable to the embodiments being described, single-stranded (such as sense or antisense) and double-stranded polynucleotides. DNA may be in the form of, e.g., antisense molecules, plasmid DNA, DNA-DNA duplexes, pre-condensed DNA, PCR products, vectors (P1, PAC, BAC, YAC, artificial chromosomes), expression cassettes, chimeric sequences, chromosomal DNA, or derivatives and combinations of these groups. DNA may be in the form of minicircle, plasmid, bacmid, minigene, ministring DNA (linear covalently closed DNA vector), closed-ended linear duplex DNA (CELiD or ceDNA), doggybone (dbDNA™) DNA, dumbbell shaped DNA, minimalistic immunological-defined gene expression (MIDGE)-vector, viral vector or nonviral vectors. RNA may be in the form of small interfering RNA (siRNA), Dicer-substrate dsRNA, small hairpin RNA (shRNA), asymmetrical interfering RNA (aiRNA), microRNA (miRNA), mRNA, rRNA, tRNA, viral RNA (vRNA), and combinations thereof. Nucleic acids include nucleic acids containing known nucleotide analogs or modified backbone residues or linkages, which are synthetic, naturally occurring, and non-naturally occurring, and which have similar binding properties as the reference nucleic acid. Examples of such analogs and/or modified residues include, without limitation, phosphorothioates, phosphorodiamidate morpholino oligomer (morpholino), phosphoramidates, methyl phosphonates, chiral-methyl phosphonates, 2′-O-methyl ribonucleotides, locked nucleic acid (LNA™), and peptide nucleic acids (PNAs). Unless specifically limited, the term encompasses nucleic acids containing known analogues of natural nucleotides that have similar binding properties as the reference nucleic acid. Unless otherwise indicated, a particular nucleic acid sequence also implicitly encompasses conservatively modified variants thereof (e.g., degenerate codon substitutions), alleles, orthologs, SNPs, and complementary sequences as well as the sequence explicitly indicated.

[0096] “Nucleotides” contain a sugar deoxyribose (DNA) or ribose (RNA), a base, and a phosphate group. Nucleotides are linked together through the phosphate groups.

[0097] “Bases” include purines and pyrimidines, which further include natural compounds adenine, thymine, guanine, cytosine, uracil, inosine, and natural analogs, and synthetic derivatives of purines and pyrimidines, which include, but are not limited to, modifications which place new reactive groups such as, but not limited to, amines, alcohols, thiols, carboxylates, and alkylhalides.

[0098] The term “nucleic acid construct” as used herein refers to a nucleic acid molecule, either single- or double-stranded, which is isolated from a naturally occurring gene or which is modified to contain segments of nucleic acids in a manner that would not otherwise exist in nature or which is synthetic. The term nucleic acid construct is synonymous with the term “expression cassette” when the nucleic acid construct contains the control sequences required for expression of a coding sequence of the present disclosure. An “expression cassette” includes a DNA coding sequence operably linked to a promoter.

[0099] By “hybridizable” or “complementary” or “substantially complementary” it is meant that a nucleic acid (e.g., RNA) includes a sequence of nucleotides that enables it to non-covalently bind, i.e. form Watson-Crick base pairs and/or G/U base pairs, “anneal”, or “hybridize,” to another nucleic acid in a sequence-specific, antiparallel, manner (i.e., a nucleic acid specifically binds to a complementary nucleic acid) under the appropriate in vitro and/or in vivo conditions of temperature and solution ionic strength. As is known in the art, standard Watson-Crick base-pairing includes: adenine (A) pairing with thymidine (T), adenine (A) pairing with uracil (U), and guanine (G) pairing with cytosine (C). In addition, it is also known in the art that for hybridization between two RNA molecules (e.g., dsRNA), guanine (G) base pairs with uracil (U). For example, G/U base-pairing is partially responsible for the degeneracy (i.e., redundancy) of the genetic code in the context of tRNA anti-codon base-pairing with codons in mRNA. In the context of this disclosure, a guanine (G) of a protein-binding segment (dsRNA duplex) of a subject DNA-targeting RNA molecule is considered complementary to an uracil (U), and vice versa. As such, when a G/U base-pair can be made at a given nucleotide position a protein-binding segment (dsRNA duplex) of a subject DNA-targeting RNA molecule, the position is not considered to be non-complementary, but is instead considered to be complementary.

[0100] The terms “peptide,” “polypeptide,” and “protein” are used interchangeably herein, and refer to a polymeric form of amino acids of any length, which can include coded and non-coded amino acids, chemically or biochemically modified or derivatized amino acids, and polypeptides having modified peptide backbones.

[0101] A DNA sequence that “encodes” a particular FVIII protein is a DNA nucleic acid sequence that is transcribed into the particular RNA and/or protein. A DNA polynucleotide may encode an RNA (mRNA) that is translated into protein, or a DNA polynucleotide may encode an RNA that is not translated into protein (e.g., tRNA, rRNA, or a DNA-targeting RNA; also called “non-coding” RNA or ncRNA”).

[0102] As used herein, the term “fusion protein” as used herein refers to a polypeptide which comprises protein domains from at least two different proteins. For example, a fusion protein may comprise (i) FVIII or fragment thereof and (ii) at least one non-GOI protein. Fusion proteins encompassed herein include, but are not limited to, an antibody, or Fc or antigen-binding fragment of an antibody fused to a FVIII protein, e.g., an extracellular domain of a receptor, ligand, enzyme or peptide. The FVIII protein or fragment thereof that is part of a fusion protein can be a monospecific antibody or a bispecific or multispecific antibody.

[0103] As used herein, the term “genomic safe harbor gene” or “safe harbor gene” refers to a gene or loci that a nucleic acid sequence can be inserted such that the sequence can integrate and function in a predictable manner (e.g., express a protein of interest) without significant negative consequences to endogenous gene activity, or the promotion of cancer. In some embodiments, a safe harbor gene is also a loci or gene where an inserted nucleic acid sequence can be expressed efficiently and at higher levels than a non-safe harbor site.

[0104] As used herein, the term “gene delivery” means a process by which foreign DNA is transferred to host cells for applications of gene therapy.

[0105] As used herein, the term “terminal repeat” or “TR” includes any viral terminal repeat or synthetic sequence that comprises at least one minimal required origin of replication and a region comprising a palindrome hairpin structure. A Rep-binding sequence (“RBS”) (also referred to as RBE (Rep-binding element)) and a terminal resolution site (“TRS”) together constitute a “minimal required origin of replication” and thus the TR comprises at least one RBS and at least one TRS. TRs that are the inverse complement of one another within a given stretch of polynucleotide sequence are typically each referred to as an “inverted terminal repeat” or “ITR”. In the context of a virus, ITRs mediate replication, virus packaging, integration and provirus rescue. As was unexpectedly found in the disclosure herein, TRs that are not inverse complements across their full length can still perform the traditional functions of ITRs, and thus the term ITR is used herein to refer to a TR in a ceDNA genome or ceDNA vector that is capable of mediating replication of ceDNA vector. It will be understood by one of ordinary skill in the art that in complex ceDNA vector configurations more than two ITRs or asymmetric ITR pairs may be present. The ITR can be an AAV ITR or a non-AAV ITR, or can be derived from an AAV ITR or a non-AAV ITR. For example, the ITR can be derived from the family Parvoviridae, which encompasses parvoviruses and dependoviruses (e.g., canine parvovirus, bovine parvovirus, mouse parvovirus, porcine parvovirus, human parvovirus B-19), or the SV40 hairpin that serves as the origin of SV40 replication can be used as an ITR, which can further be modified by truncation, substitution, deletion, insertion and/or addition. Parvoviridae family viruses consist of two subfamilies: Parvovirinae, which infect vertebrates, and Densovirinae, which infect invertebrates. Dependoparvoviruses include the viral family of the adeno-associated viruses (AAV) which are capable of replication in vertebrate hosts including, but not limited to, human, primate, bovine, canine, equine and ovine species. For convenience herein, an ITR located 5′ to (upstream of) an expression cassette in a ceDNA vector is referred to as a “5′ ITR” or a “left ITR”, and an ITR located 3′ to (downstream of) an expression cassette in a ceDNA vector is referred to as a “3′ ITR” or a “right ITR”.

[0106] A “wild-type ITR” or “WT-ITR” refers to the sequence of a naturally occurring ITR sequence in an AAV or other dependovirus that retains, e.g., Rep binding activity and Rep nicking ability. The nucleic acid sequence of a WT-ITR from any AAV serotype may slightly vary from the canonical naturally occurring sequence due to degeneracy of the genetic code or drift, and therefore WT-ITR sequences encompassed for use herein include WT-ITR sequences as result of naturally occurring changes taking place during the production process (e.g., a replication error).

[0107] As used herein, the term “substantially symmetrical WT-ITRs” or a “substantially symmetrical WT-ITR pair” refers to a pair of WT-ITRs within a single ceDNA genome or ceDNA vector that are both wild-type ITRs that have an inverse complement sequence across their entire length. For example, an ITR can be considered to be a wild-type sequence, even if it has one or more nucleotides that deviate from the canonical naturally occurring sequence, so long as the changes do not affect the properties and overall three-dimensional structure of the sequence. In some aspects, the deviating nucleotides represent conservative sequence changes. As one non-limiting example, a sequence that has at least 95%, 96%, 97%, 98%, or 99% sequence identity to the canonical sequence (as measured, e.g., using BLAST at default settings), and also has a symmetrical three-dimensional spatial organization to the other WT-ITR such that their 3D structures are the same shape in geometrical space. The substantially symmetrical WT-ITR has the same A, C-C′ and B-B′ loops in 3D space. A substantially symmetrical WT-ITR can be functionally confirmed as WT by determining that it has an operable Rep binding site (RBE or RBE′) and terminal resolution site (TRS) that pairs with the appropriate Rep protein. One can optionally test other functions, including transgene expression under permissive conditions.

[0108] As used herein, the phrases of “modified ITR” or “mod-ITR” or “mutant ITR” are used interchangeably herein and refer to an ITR that has a mutation in at least one or more nucleotides as compared to the WT-ITR from the same serotype. The mutation can result in a change in one or more of A, C, C′, B, B′ regions in the ITR, and can result in a change in the three-dimensional spatial organization (i.e. its 3D structure in geometric space) as compared to the 3D spatial organization of a WT-ITR of the same serotype.

[0109] As used herein, the term “asymmetric ITRs” also referred to as “asymmetric ITR pairs” refers to a pair of ITRs within a single ceDNA genome or ceDNA vector that are not inverse complements across their full length. As one non-limiting example, an asymmetric ITR pair does not have a symmetrical three-dimensional spatial organization to their cognate ITR such that their 3D structures are different shapes in geometrical space. Stated differently, an asymmetrical ITR pair have the different overall geometric structure, i.e., they have different organization of their A, C-C′ and B-B′ loops in 3D space (e.g., one ITR may have a short C-C′ arm and/or short B-B′ arm as compared to the cognate ITR). The difference in sequence between the two ITRs may be due to one or more nucleotide addition, deletion, truncation, or point mutation. In one embodiment, one ITR of the asymmetric ITR pair may be a wild-type AAV ITR sequence and the other ITR a modified ITR as defined herein (e.g., a non-wild-type or synthetic ITR sequence). In another embodiment, neither ITRs of the asymmetric ITR pair is a wild-type AAV sequence and the two ITRs are modified ITRs that have different shapes in geometrical space (i.e., a different overall geometric structure). In some embodiments, one mod-ITRs of an asymmetric ITR pair can have a short C-C′ arm and the other ITR can have a different modification (e.g., a single arm, or a short B-B′ arm etc.) such that they have different three-dimensional spatial organization as compared to the cognate asymmetric mod-ITR.

[0110] As used herein, the term “symmetric ITRs” refers to a pair of ITRs within a single ceDNA genome or ceDNA vector that are wild-type or mutated (e.g., modified relative to wild-type) dependoviral ITR sequences and are inverse complements across their full length. In one non-limiting example, both ITRs are wild-type ITRs sequences from AAV2. In another example, neither ITRs are wild-type ITR AAV2 sequences (i.e., they are a modified ITR, also referred to as a mutant ITR), and can have a difference in sequence from the wild-type ITR due to nucleotide addition, deletion, substitution, truncation, or point mutation. For convenience herein, an ITR located 5′ to (upstream of) an expression cassette in a ceDNA vector is referred to as a “5′ ITR” or a “left ITR”, and an ITR located 3′ to (downstream of) an expression cassette in a ceDNA vector is referred to as a “3′ ITR” or a “right ITR”.

[0111] As used herein, the terms “substantially symmetrical modified-ITRs” or a “substantially symmetrical mod-ITR pair” refers to a pair of modified-ITRs within a single ceDNA genome or ceDNA vector that are both that have an inverse complement sequence across their entire length. For example, the modified ITR can be considered substantially symmetrical, even if it has some nucleic acid sequences that deviate from the inverse complement sequence so long as the changes do not affect the properties and overall shape. As one non-limiting example, a sequence that has at least 85%, 90%, 95%, 96%, 97%, 98%, or 99% sequence identity to the canonical sequence (as measured using BLAST at default settings), and also has a symmetrical three-dimensional spatial organization to their cognate modified ITR such that their 3D structures are the same shape in geometrical space. Stated differently, a substantially symmetrical modified-ITR pair have the same A, C-C′ and B-B′ loops organized in 3D space. In some embodiments, the ITRs from a mod-ITR pair may have different reverse complement nucleic acid sequences but still have the same symmetrical three-dimensional spatial organization—that is both ITRs have mutations that result in the same overall 3D shape. For example, one ITR (e.g., 5′ ITR) in a mod-ITR pair can be from one serotype, and the other ITR (e.g., 3′ ITR) can be from a different serotype, however, both can have the same corresponding mutation (e.g., if the 5′ITR has a deletion in the C region, the cognate modified 3′ITR from a different serotype has a deletion at the corresponding position in the C′ region), such that the modified ITR pair has the same symmetrical three-dimensional spatial organization. In such embodiments, each ITR in a modified ITR pair can be from different serotypes (e.g., AAV1, 2, 3, 4, 5, 6, 7, 8, 9, 10, 11, and 12) such as the combination of AAV2 and AAV6, with the modification in one ITR reflected in the corresponding position in the cognate ITR from a different serotype. In one embodiment, a substantially symmetrical modified ITR pair refers to a pair of modified ITRs (mod-ITRs) so long as the difference in nucleic acid sequences between the ITRs does not affect the properties or overall shape and they have substantially the same shape in 3D space. As a non-limiting example, a mod-ITR that has at least 95%, 96%, 97%, 98% or 99% sequence identity to the canonical mod-ITR as determined by standard means well known in the art such as BLAST (Basic Local Alignment Search Tool), or BLASTN at default settings, and also has a symmetrical three-dimensional spatial organization such that their 3D structure is the same shape in geometric space. A substantially symmetrical mod-ITR pair has the same A, C-C′ and B-B′ loops in 3D space, e.g., if a modified ITR in a substantially symmetrical mod-ITR pair has a deletion of a C-C′ arm, then the cognate mod-ITR has the corresponding deletion of the C-C′ loop and also has a similar 3D structure of the remaining A and B-B′ loops in the same shape in geometric space of its cognate mod-ITR.

[0112] The term “flanking” refers to a relative position of one nucleic acid sequence with respect to another nucleic acid sequence. Generally, in the sequence ABC, B is flanked by A and C. The same is true for the arrangement A×B×C. Thus, a flanking sequence precedes or follows a flanked sequence but need not be contiguous with, or immediately adjacent to the flanked sequence. In one embodiment, the term flanking refers to terminal repeats at each end of the linear duplex ceDNA vector.

[0113] As used herein, the terms “treat,” “treating,” and/or “treatment” include abrogating, substantially inhibiting, slowing or reversing the progression of a condition, substantially ameliorating clinical symptoms of a condition, or substantially preventing the appearance of clinical symptoms of a condition, obtaining beneficial or desired clinical results. According to some embodiments, the condition is hemophilia A. Treating further refers to accomplishing one or more of the following: (a) reducing the severity of the disorder; (b) limiting development of symptoms characteristic of the disorder(s) being treated; (c) limiting worsening of symptoms characteristic of the disorder(s) being treated; (d) limiting recurrence of the disorder(s) in patients that have previously had the disorder(s); and (e) limiting recurrence of symptoms in patients that were previously asymptomatic for the disorder(s). Beneficial or desired clinical results, such as pharmacologic and/or physiologic effects include, but are not limited to, preventing the disease, disorder or condition from occurring in a subject that may be predisposed to the disease, disorder or condition but does not yet experience or exhibit symptoms of the disease (prophylactic treatment), alleviation of symptoms of the disease, disorder or condition, diminishment of extent of the disease, disorder or condition, stabilization (i.e., not worsening) of the disease, disorder or condition, preventing spread of the disease, disorder or condition, delaying or slowing of the disease, disorder or condition progression, amelioration or palliation of the disease, disorder or condition, and combinations thereof, as well as prolonging survival as compared to expected survival if not receiving treatment.

[0114] As used herein, the term “increase,” “enhance,” “raise” (and like terms) generally refers to the act of increasing, either directly or indirectly, a concentration, level, function, activity, or behavior relative to the natural, expected, or average, or relative to a control condition.

[0115] As used herein, the term “minimize”, “reduce”, “decrease,” and/or “inhibit” (and like terms) generally refers to the act of reducing, either directly or indirectly, a concentration, level, function, activity, or behavior relative to the natural, expected, or average, or relative to a control condition.

[0116] As used herein, the term “ceDNA genome” refers to an expression cassette that further incorporates at least one inverted terminal repeat region. A ceDNA genome may further comprise one or more spacer regions. In some embodiments the ceDNA genome is incorporated as an intermolecular duplex polynucleotide of DNA into a plasmid or viral genome.

[0117] As used herein, the term “ceDNA spacer region” refers to an intervening sequence that separates functional elements in the ceDNA vector or ceDNA genome. In some embodiments, ceDNA spacer regions keep two functional elements at a desired distance for optimal functionality. In some embodiments, ceDNA spacer regions provide or add to the genetic stability of the ceDNA genome within e.g., a plasmid or baculovirus. In some embodiments, ceDNA spacer regions facilitate ready genetic manipulation of the ceDNA genome by providing a convenient location for cloning sites and the like. For example, in certain aspects, an oligonucleotide “polylinker” containing several restriction endonuclease sites, or a non-open reading frame sequence designed to have no known protein (e.g., transcription factor) binding sites can be positioned in the ceDNA genome to separate the cis-acting factors, e.g., inserting a 6mer, 12mer, 18mer, 24mer, 48mer, 86mer, 176mer, etc. between the terminal resolution site and the upstream transcriptional regulatory element. Similarly, the spacer may be incorporated between the polyadenylation signal sequence and the 3′-terminal resolution site.

[0118] As used herein, the terms “Rep binding site, “Rep binding element, “RBE” and “RBS” are used interchangeably and refer to a binding site for Rep protein (e.g., AAV Rep 78 or AAV Rep 68) which upon binding by a Rep protein permits the Rep protein to perform its site-specific endonuclease activity on the sequence incorporating the RBS. An RBS sequence and its inverse complement together form a single RBS. RBS sequences are known in the art, and include, for example, 5′-GCGCGCTCGCTCGCTC-3′ (SEQ ID NO: 437), an RBS sequence identified in AAV2. Any known RBS sequence may be used in the embodiments of the disclosure, including other known AAV RBS sequences and other naturally known or synthetic RBS sequences. Without being bound by theory it is thought that he nuclease domain of a Rep protein binds to the duplex nucleic acid sequence GCTC, and thus the two known AAV Rep proteins bind directly to and stably assemble on the duplex oligonucleotide, 5′-(GCGC)(GCTC)(GCTC)(GCTC)-3′ (SEQ ID NO: 437). In addition, soluble aggregated conformers (i.e., undefined number of inter-associated Rep proteins) dissociate and bind to oligonucleotides that contain Rep binding sites. Each Rep protein interacts with both the nitrogenous bases and phosphodiester backbone on each strand. The interactions with the nitrogenous bases provide sequence specificity whereas the interactions with the phosphodiester backbone are non- or less-sequence specific and stabilize the protein-DNA complex.

[0119] As used herein, the terms “terminal resolution site” and “TRS” are used interchangeably herein and refer to a region at which Rep forms a tyrosine-phosphodiester bond with the 5′ thymidine generating a 3′ OH that serves as a substrate for DNA extension via a cellular DNA polymerase, e.g., DNA pol delta or DNA pol epsilon. Alternatively, the Rep-thymidine complex may participate in a coordinated ligation reaction. In some embodiments, a TRS minimally encompasses a non-base-paired thymidine. In some embodiments, the nicking efficiency of the TRS can be controlled at least in part by its distance within the same molecule from the RBS. When the acceptor substrate is the complementary ITR, then the resulting product is an intramolecular duplex. TRS sequences are known in the art, and include, for example, 5′-GGTTGA-3′, the hexanucleotide sequence identified in AAV2. Any known TRS sequence may be used in the embodiments of the disclosure, including other known AAV TRS sequences and other naturally known or synthetic TRS sequences such as AGTT (SEQ ID NO: 438), GGTTGG, AGTTGG, AGTTGA, and other motifs such as RRTTRR.

[0120] As used herein, the term “ceDNA-plasmid” refers to a plasmid that comprises a ceDNA genome as an intermolecular duplex.

[0121] As used herein, the term “ceDNA-bacmid” refers to an infectious baculovirus genome comprising a ceDNA genome as an intermolecular duplex that is capable of propagating in E. coli as a plasmid, and so can operate as a shuttle vector for baculovirus.

[0122] As used herein, the term “ceDNA-baculovirus” refers to a baculovirus that comprises a ceDNA genome as an intermolecular duplex within the baculovirus genome.

[0123] As used herein, the terms “ceDNA-baculovirus infected insect cell” and “ceDNA-BIIC” are used interchangeably, and refer to an invertebrate host cell (including, but not limited to an insect cell (e.g., an Sf9 cell)) infected with a ceDNA-baculovirus.

[0124] As used herein, the term “ceDNA” refers to capsid-free closed-ended linear double stranded (ds) duplex DNA for non-viral gene transfer, synthetic or otherwise. Detailed description of ceDNA is described in International application of PCT/US2017/020828, filed Mar. 3, 2017, the entire contents of which are expressly incorporated herein by reference. Certain methods for the production of ceDNA comprising various inverted terminal repeat (ITR) sequences and configurations using cell-based methods are described in Example 1 of International applications PCT/US18/49996, filed Sep. 7, 2018, and PCT/US2018/064242, filed Dec. 6, 2018 each of which is incorporated herein in its entirety by reference. Certain methods for the production of synthetic ceDNA vectors comprising various ITR sequences and configurations are described, e.g., in International application PCT/US2019/14122, filed Jan. 18, 2019, the entire content of which is incorporated herein by reference.

[0125] As used herein, the term “closed-ended DNA vector” refers to a capsid-free DNA vector with at least one covalently closed end and where at least part of the vector has an intramolecular duplex structure.

[0126] As used herein, the terms “ceDNA vector” and “ceDNA” are used interchangeably and refer to a closed-ended DNA vector comprising at least one terminal palindrome. In some embodiments, the ceDNA comprises two covalently-closed ends.

[0127] As used herein, the term “neDNA” or “nicked ceDNA” refers to a closed-ended DNA having a nick or a gap of 1-100 base pairs in a stem region or spacer region 5′ upstream of an open reading frame (e.g., a promoter and transgene to be expressed).

[0128] As used herein, the terms “gap” refers to a discontinued portion of synthetic DNA vector of the present disclosure, creating a stretch of single stranded DNA portion in otherwise double stranded ceDNA. The gap can be 1 base-pair to 100 base-pair long in length in one strand of a duplex DNA. Typical gaps, designed and created by the methods described herein and synthetic vectors generated by the methods can be, for example, 1, 2, 3, 4, 5, 6, 7, 8, 9, 10, 11, 12, 13, 14, 15, 16, 17, 18, 19, 20, 21, 22, 23, 24, 25, 26, 27, 28, 29, 30, 31, 32, 33, 34, 35, 36, 37, 38, 39, 40, 41, 42, 43, 44, 45, 46, 47, 48, 49, 50, 51, 52, 53, 54, 55, 56, 57, 58, 59 or 60 bp long in length. Exemplified gaps in the present disclosure can be 1 bp to 10 bp long, 1 to 20 bp long, 1 to 30 bp long in length.

[0129] As defined herein, “reporters” refer to proteins that can be used to provide detectable read-outs. Reporters generally produce a measurable signal such as fluorescence, color, or luminescence. Reporter protein coding sequences encode proteins whose presence in the cell or organism is readily observed. For example, fluorescent proteins cause a cell to fluoresce when excited with light of a particular wavelength, luciferases cause a cell to catalyze a reaction that produces light, and enzymes such as β-galactosidase convert a substrate to a colored product. Exemplary reporter polypeptides useful for experimental or diagnostic purposes include, but are not limited to β-lactamase, β-galactosidase (LacZ), alkaline phosphatase (AP), thymidine kinase (TK), green fluorescent protein (GFP) and other fluorescent proteins, chloramphenicol acetyltransferase (CAT), luciferase, and others well known in the art.

[0130] As used herein, the terms “sense” and “antisense” refer to the orientation of the structural element on the polynucleotide. The sense and antisense versions of an element are the reverse complement of each other.

[0131] As used herein, the term “synthetic AAV vector” and “synthetic production of AAV vector” refers to an AAV vector and synthetic production methods thereof in an entirely cell-free environment.

[0132] As used herein, “reporters” refer to proteins that can be used to provide detectable read-outs. Reporters generally produce a measurable signal such as fluorescence, color, or luminescence. Reporter protein coding sequences encode proteins whose presence in the cell or organism is readily observed. For example, fluorescent proteins cause a cell to fluoresce when excited with light of a particular wavelength, luciferases cause a cell to catalyze a reaction that produces light, and enzymes such as β-galactosidase convert a substrate to a colored product. Exemplary reporter polypeptides useful for experimental or diagnostic purposes include, but are not limited to β-lactamase, β-galactosidase (LacZ), alkaline phosphatase (AP), thymidine kinase (TK), green fluorescent protein (GFP) and other fluorescent proteins, chloramphenicol acetyltransferase (CAT), luciferase, and others well known in the art.

[0133] As used herein, the term “effector protein” refers to a polypeptide that provides a detectable read-out, either as, for example, a reporter polypeptide, or more appropriately, as a polypeptide that kills a cell, e.g., a toxin, or an agent that renders a cell susceptible to killing with a chosen agent or lack thereof. Effector proteins include any protein or peptide that directly targets or damages the host cell's DNA and/or RNA. For example, effector proteins can include, but are not limited to, a restriction endonuclease that targets a host cell DNA sequence (whether genomic or on an extrachromosomal element), a protease that degrades a polypeptide target necessary for cell survival, a DNA gyrase inhibitor, and a ribonuclease-type toxin. In some embodiments, the expression of an effector protein controlled by a synthetic biological circuit as described herein can participate as a factor in another synthetic biological circuit to thereby expand the range and complexity of a biological circuit system's responsiveness.

[0134] Transcriptional regulators refer to transcriptional activators and repressors that either activate or repress transcription of a gene of interest, such as FVIII. Promoters are regions of nucleic acid that initiate transcription of a particular gene. Transcriptional activators typically bind nearby to transcriptional promoters and recruit RNA polymerase to directly initiate transcription. Repressors bind to transcriptional promoters and sterically hinder transcriptional initiation by RNA polymerase. Other transcriptional regulators may serve as either an activator or a repressor depending on where they bind and cellular and environmental conditions. Non-limiting examples of transcriptional regulator classes include, but are not limited to homeodomain proteins, zinc-finger proteins, winged-helix (forkhead) proteins, and leucine-zipper proteins.

[0135] As used herein, a “repressor protein” or “inducer protein” is a protein that binds to a regulatory sequence element and represses or activates, respectively, the transcription of sequences operatively linked to the regulatory sequence element. Preferred repressor and inducer proteins as described herein are sensitive to the presence or absence of at least one input agent or environmental input. Preferred proteins as described herein are modular in form, comprising, for example, separable DNA-binding and input agent-binding or responsive elements or domains.

[0136] As used herein, “carrier” includes any and all solvents, dispersion media, vehicles, coatings, diluents, antibacterial and antifungal agents, isotonic and absorption delaying agents, buffers, carrier solutions, suspensions, colloids, and the like. The use of such media and agents for pharmaceutically active substances is well known in the art. Supplementary active ingredients can also be incorporated into the compositions. The phrase “pharmaceutically-acceptable” refers to molecular entities and compositions that do not produce a toxic, an allergic, or similar untoward reaction when administered to a host.

[0137] As used herein, an “input agent responsive domain” is a domain of a transcription factor that binds to or otherwise responds to a condition or input agent in a manner that renders a linked DNA binding fusion domain responsive to the presence of that condition or input. In one embodiment, the presence of the condition or input results in a conformational change in the input agent responsive domain, or in a protein to which it is fused, that modifies the transcription-modulating activity of the transcription factor.

[0138] The term “in vivo” refers to assays or processes that occur in or within an organism, such as a multicellular animal. In some of the aspects described herein, a method or use can be said to occur “in vivo” when a unicellular organism, such as a bacterium, is used. The term “ex vivo” refers to methods and uses that are performed using a living cell with an intact membrane that is outside of the body of a multicellular animal or plant, e.g., explants, cultured cells, including primary cells and cell lines, transformed cell lines, and extracted tissue or cells, including blood cells, among others. The term “in vitro” refers to assays and methods that do not require the presence of a cell with an intact membrane, such as cellular extracts, and can refer to the introducing of a programmable synthetic biological circuit in a non-cellular system, such as a medium not comprising cells or cellular systems, such as cellular extracts.

[0139] The term “promoter,” as used herein, refers to any nucleic acid sequence that regulates the expression of another nucleic acid sequence by driving transcription of the nucleic acid sequence, which can be a target gene, e.g., heterologous target gene, encoding a protein or an RNA. Promoters can be constitutive, inducible, repressible, tissue-specific, or any combination thereof. A promoter is a control region of a nucleic acid sequence at which initiation and rate of transcription of the remainder of a nucleic acid sequence are controlled. A promoter can also contain genetic elements at which regulatory proteins and molecules can bind, such as RNA polymerase and other transcription factors. In some embodiments of the aspects described herein, a promoter can drive the expression of a transcription factor that regulates the expression of the promoter itself. Within the promoter sequence will be found a transcription initiation site, as well as protein binding domains responsible for the binding of RNA polymerase. Eukaryotic promoters will often, but not always, contain “TATA” boxes and “CAT” boxes. Various promoters, including inducible promoters, may be used to drive the expression of transgenes in the ceDNA vectors disclosed herein. A promoter sequence may be bounded at its 3′ terminus by the transcription initiation site and extends upstream (5′ direction) to include the minimum number of bases or elements necessary to initiate transcription at levels detectable above background.

[0140] The term “enhancer” as used herein refers to a cis-acting regulatory sequence (e.g., 50-1,500 base pairs) that binds one or more proteins (e.g., activator proteins, or transcription factor) to increase transcriptional activation of a nucleic acid sequence. Enhancers can be positioned up to 1,000,000 base pars upstream of the gene start site or downstream of the gene start site that they regulate. An enhancer can be positioned within an intronic region, or in the exonic region of an unrelated gene. An enhancer can be one naturally associated with a promoter, a gene or a sequence.

[0141] A promoter can be said to drive expression or drive transcription of the nucleic acid sequence that it regulates. The phrases “operably linked,” “operatively positioned,” “operatively linked,” “under control,” and “under transcriptional control” indicate that a promoter is in a correct functional location and/or orientation in relation to a nucleic acid sequence it regulates to control transcriptional initiation and/or expression of that sequence. An “inverted promoter,” as used herein, refers to a promoter in which the nucleic acid sequence is in the reverse orientation, such that what was the coding strand is now the non-coding strand, and vice versa. Inverted promoter sequences can be used in various embodiments to regulate the state of a switch. In addition, in various embodiments, a promoter can be used in conjunction with an enhancer.

[0142] A promoter can be one naturally associated with a gene or sequence, as can be obtained by isolating the 5′ non-coding sequences located upstream of the coding segment and/or exon of a given gene or sequence. Such a promoter can be referred to as “endogenous.” Similarly, in some embodiments, an enhancer can be one naturally associated with a nucleic acid sequence, located either downstream or upstream of that sequence.

[0143] In some embodiments, a coding nucleic acid segment is positioned under the control of a “recombinant promoter” or “heterologous promoter,” both of which refer to a promoter that is not normally associated with the encoded nucleic acid sequence it is operably linked to in its natural environment. A recombinant or heterologous enhancer refers to an enhancer not normally associated with a given nucleic acid sequence in its natural environment. Such promoters or enhancers can include promoters or enhancers of other genes; promoters or enhancers isolated from any other prokaryotic, viral, or eukaryotic cell; and synthetic promoters or enhancers that are not “naturally occurring,” i.e., comprise different elements of different transcriptional regulatory regions, and/or mutations that alter expression through methods of genetic engineering that are known in the art. In addition to producing nucleic acid sequences of promoters and enhancers synthetically, promoter sequences can be produced using recombinant cloning and/or nucleic acid amplification technology, including PCR, in connection with the synthetic biological circuits and modules disclosed herein (see, e.g., U.S. Pat. Nos. 4,683,202, 5,928,906, each incorporated herein by reference). Furthermore, it is contemplated that control sequences that direct transcription and/or expression of sequences within non-nuclear organelles such as mitochondria, chloroplasts, and the like, can be employed as well.

[0144] As described herein, an “inducible promoter” is one that is characterized by initiating or enhancing transcriptional activity when in the presence of, influenced by, or contacted by an inducer or inducing agent. An “inducer” or “inducing agent,” as defined herein, can be endogenous, or a normally exogenous compound or protein that is administered in such a way as to be active in inducing transcriptional activity from the inducible promoter. In some embodiments, the inducer or inducing agent, i.e., a chemical, a compound or a protein, can itself be the result of transcription or expression of a nucleic acid sequence (i.e., an inducer can be an inducer protein expressed by another component or module), which itself can be under the control or an inducible promoter. In some embodiments, an inducible promoter is induced in the absence of certain agents, such as a repressor. Examples of inducible promoters include but are not limited to, tetracycline, metallothionine, ecdysone, mammalian viruses (e.g., the adenovirus late promoter; and the mouse mammary tumor virus long terminal repeat (MMTV-LTR)) and other steroid-responsive promoters, rapamycin responsive promoters and the like.

[0145] The terms “DNA regulatory sequences,” “control elements,” and “regulatory elements,” used interchangeably herein, refer to transcriptional and translational control sequences, such as promoters, enhancers, polyadenylation signals, terminators, protein degradation signals, and the like, that provide for and/or regulate transcription of a non-coding sequence (e.g., DNA-targeting RNA) or a coding sequence (e.g., site-directed modifying polypeptide, or Cas9/Csn1 polypeptide) and/or regulate translation of an encoded polypeptide.

[0146] “Operably linked” refers to a juxtaposition wherein the components so described are in a relationship permitting them to function in their intended manner. For instance, a promoter is operably linked to a coding sequence if the promoter affects its transcription or expression. An “expression cassette” includes a DNA sequence, e.g., heterologous DNA sequence, that is operably linked to a promoter or other regulatory sequence sufficient to direct transcription of the transgene in the ceDNA vector. Suitable promoters include, for example, tissue specific promoters or promoters of AAV origin.

[0147] The term “subject” as used herein refers to a human or animal, to whom treatment, including prophylactic treatment, with the ceDNA vector according to the present disclosure, is provided. Usually, the animal is a vertebrate such as, but not limited to a primate, rodent, domestic animal or game animal. Primates include but are not limited to, chimpanzees, cynomolgous monkeys, spider monkeys, and macaques, e.g., Rhesus. Rodents include mice, rats, woodchucks, ferrets, rabbits and hamsters. Domestic and game animals include, but are not limited to, cows, horses, pigs, deer, bison, buffalo, feline species, e.g., domestic cat, canine species, e.g., dog, fox, wolf, avian species, e.g., chicken, emu, ostrich, and fish, e.g., trout, catfish and salmon. In certain embodiments of the aspects described herein, the subject is a mammal, e.g., a primate or a human. A subject can be male or female. Additionally, a subject can be an infant or a child. In some embodiments, the subject can be a neonate or an unborn subject, e.g., the subject is in utero. Preferably, the subject is a mammal. The mammal can be a human, non-human primate, mouse, rat, dog, cat, horse, or cow, but is not limited to these examples. Mammals other than humans can be advantageously used as subjects that represent animal models of diseases and disorders. In addition, the methods and compositions described herein can be used for domesticated animals and/or pets. A human subject can be of any age, gender, race or ethnic group, e.g., Caucasian (white), Asian, African, black, African American, African European, Hispanic, Mideastern, etc. In some embodiments, the subject can be a patient or other subject in a clinical setting. In some embodiments, the subject is already undergoing treatment. In some embodiments, the subject is an embryo, a fetus, neonate, infant, child, adolescent, or adult. In some embodiments, the subject is a human fetus, human neonate, human infant, human child, human adolescent, or human adult. In some embodiments, the subject is an animal embryo, or non-human embryo or non-human primate embryo. In some embodiments, the subject is a human embryo.

[0148] As used herein, the term “host cell”, includes any cell type that is susceptible to transformation, transfection, transduction, and the like with a nucleic acid construct or ceDNA expression vector of the present disclosure. As non-limiting examples, a host cell can be an isolated primary cell, pluripotent stem cells, CD34⁺ cells), induced pluripotent stem cells, or any of a number of immortalized cell lines (e.g., HepG2 cells). Alternatively, a host cell can be an in situ or in vivo cell in a tissue, organ or organism.

[0149] The term “exogenous” refers to a substance present in a cell other than its native source. The term “exogenous” when used herein can refer to a nucleic acid (e.g., a nucleic acid encoding a polypeptide) or a polypeptide that has been introduced by a process involving the hand of man into a biological system such as a cell or organism in which it is not normally found and one wishes to introduce the nucleic acid or polypeptide into such a cell or organism. Alternatively, “exogenous” can refer to a nucleic acid or a polypeptide that has been introduced by a process involving the hand of man into a biological system such as a cell or organism in which it is found in relatively low amounts and one wishes to increase the amount of the nucleic acid or polypeptide in the cell or organism, e.g., to create ectopic expression or levels. In contrast, the term “endogenous” refers to a substance that is native to the biological system or cell.

[0150] The term “sequence identity” refers to the relatedness between two nucleic acid sequences. For purposes of the present disclosure, the degree of sequence identity between two deoxyribonucleotide sequences is determined using the Needleman-Wunsch algorithm (Needleman and Wunsch, 1970, supra) as implemented in the Needle program of the EMBOSS package (EMBOSS: The European Molecular Biology Open Software Suite, Rice et al., 2000, supra), preferably version 3.0.0 or later. The optional parameters used are gap open penalty of 10, gap extension penalty of 0.5, and the EDNAFULL (EMBOSS version of NCBI NUC4.4) substitution matrix. The output of Needle labeled “longest identity” (obtained using the -nobrief option) is used as the percent identity and is calculated as follows: (Identical Deoxyribonucleotides.times.100)/(Length of Alignment-Total Number of Gaps in Alignment). The length of the alignment is preferably at least 10 nucleotides, preferably at least 25 nucleotides more preferred at least 50 nucleotides and most preferred at least 100 nucleotides.

[0151] The term “homology” or “homologous” as used herein is defined as the percentage of nucleotide residues that are identical to the nucleotide residues in the corresponding sequence on the target chromosome, after aligning the sequences and introducing gaps, if necessary, to achieve the maximum percent sequence identity. Alignment for purposes of determining percent nucleotide sequence homology can be achieved in various ways that are within the skill in the art, for instance, using publicly available computer software such as BLAST, BLAST-2, ALIGN, ClustalW2 or Megalign (DNASTAR) software. Those skilled in the art can determine appropriate parameters for aligning sequences, including any algorithms needed to achieve maximal alignment over the full length of the sequences being compared. In some embodiments, a nucleic acid sequence (e.g., DNA sequence), for example of a homology arm, is considered “homologous” when the sequence is at least 70%, at least 75%, at least 80%, at least 85%, at least 90%, at least 91%, at least 92%, at least 93%, at least 94%, at least 95%, at least 96%, at least 97%, at least 98%, at least 99%, or more, identical to the corresponding native or unedited nucleic acid sequence (e.g., genomic sequence) of the host cell.

[0152] The term “heterologous,” as used herein, means a nucleotide or polypeptide sequence that is not found in the native nucleic acid or protein, respectively. A heterologous nucleic acid sequence may be linked to a naturally-occurring nucleic acid sequence (or a variant thereof) (e.g., by genetic engineering) to generate a chimeric nucleotide sequence encoding a chimeric polypeptide. A heterologous nucleic acid sequence may be linked to a variant polypeptide (e.g., by genetic engineering) to generate a nucleotide sequence encoding a fusion variant polypeptide.

[0153] A “vector” or “expression vector” is a replicon, such as plasmid, bacmid, phage, virus, virion, or cosmid, to which another DNA segment, i.e., an “insert”, may be attached so as to bring about the replication of the attached segment in a cell. A vector can be a nucleic acid construct designed for delivery to a host cell or for transfer between different host cells. As used herein, a vector can be viral or non-viral in origin and/or in final form, however for the purpose of the present disclosure, a “vector” generally refers to a ceDNA vector, as that term is used herein. The term “vector” encompasses any genetic element that is capable of replication when associated with the proper control elements and that can transfer gene sequences to cells. In some embodiments, a vector can be an expression vector or recombinant vector.

[0154] As used herein, the term “expression vector” refers to a vector that directs expression of an RNA or polypeptide from sequences linked to transcriptional regulatory sequences on the vector. The sequences expressed will often, but not necessarily, be heterologous to the cell. An expression vector may comprise additional elements, for example, the expression vector may have two replication systems, thus allowing it to be maintained in two organisms, for example in human cells for expression and in a prokaryotic host for cloning and amplification. The term “expression” refers to the cellular processes involved in producing RNA and proteins and as appropriate, secreting proteins, including where applicable, but not limited to, for example, transcription, transcript processing, translation and protein folding, modification and processing. “Expression products” include RNA transcribed from a gene, and polypeptides obtained by translation of mRNA transcribed from a gene. The term “gene” means the nucleic acid sequence which is transcribed (DNA) to RNA in vitro or in vivo when operably linked to appropriate regulatory sequences. The gene may or may not include regions preceding and following the coding region, e.g., 5′ untranslated (5′UTR) or “leader” sequences and 3′ UTR or “trailer” sequences, as well as intervening sequences (introns) between individual coding segments (exons).

[0155] By “recombinant vector” is meant a vector that includes a nucleic acid sequence, e.g., heterologous nucleic acid sequence, or “transgene” that is capable of expression in vivo. It should be understood that the vectors described herein can, in some embodiments, be combined with other suitable compositions and therapies. In some embodiments, the vector is episomal. The use of a suitable episomal vector provides a means of maintaining the nucleotide of interest in the subject in high copy number extra chromosomal DNA thereby eliminating potential effects of chromosomal integration.

[0156] The phrase “genetic disease” as used herein refers to a disease, partially or completely, directly or indirectly, caused by one or more abnormalities in the genome, especially a condition that is present from birth. The abnormality may be a mutation, an insertion or a deletion. The abnormality may affect the coding sequence of the gene or its regulatory sequence. The genetic disease may be, but not limited to DMD, hemophilia, cystic fibrosis, Huntington's chorea, familial hypercholesterolemia (LDL receptor defect), hepatoblastoma, Wilson's disease, congenital hepatic porphyria, inherited disorders of hepatic metabolism, Lesch Nyhan syndrome, sickle cell anemia, thalassemia, xeroderma pigmentosum, Fanconi's anemia, retinitis pigmentosa, ataxia telangiectasia, Bloom's syndrome, retinoblastoma, and Tay-Sachs disease.

[0157] As used herein the term “comprising” or “comprises” is used in reference to compositions, methods, and respective component(s) thereof, that are essential to the method or composition, yet open to the inclusion of unspecified elements, whether essential or not.

[0158] As used herein the term “consisting essentially of” refers to those elements required for a given embodiment. The term permits the presence of elements that do not materially affect the basic and novel or functional characteristic(s) of that embodiment. The use of “comprising” indicates inclusion rather than limitation.

[0159] The term “consisting of” refers to compositions, methods, and respective components thereof as described herein, which are exclusive of any element not recited in that description of the embodiment.

[0160] As used herein the term “consisting essentially of” refers to those elements required for a given embodiment. The term permits the presence of additional elements that do not materially affect the basic and novel or functional characteristic(s) of that embodiment of the disclosure.

[0161] As used in this specification and the appended claims, the singular forms “a,” “an,” and “the” include plural references unless the context clearly dictates otherwise. Thus, for example, references to “the method” includes one or more methods, and/or steps of the type described herein and/or which will become apparent to those persons skilled in the art upon reading this disclosure and so forth. Similarly, the word “or” is intended to include “and” unless the context clearly indicates otherwise. Although methods and materials similar or equivalent to those described herein can be used in the practice or testing of this disclosure, suitable methods and materials are described below. The abbreviation, “e.g.” is derived from the Latin exempli gratia and is used herein to indicate a non-limiting example. Thus, the abbreviation “e.g.” is synonymous with the term “for example.”

[0162] Groupings of alternative elements or embodiments of the disclosure disclosed herein are not to be construed as limitations. Each group member can be referred to and claimed individually or in any combination with other members of the group or other elements found herein. One or more members of a group can be included in, or deleted from, a group for reasons of convenience and/or patentability. When any such inclusion or deletion occurs, the specification is herein deemed to contain the group as modified thus fulfilling the written description of all Markush groups used in the appended claims.

[0163] In some embodiments of any of the aspects, the disclosure described herein does not concern a process for cloning human beings, processes for modifying the germ line genetic identity of human beings, uses of human embryos for industrial or commercial purposes or processes for modifying the genetic identity of animals which are likely to cause them suffering without any substantial medical benefit to man or animal, and also animals resulting from such processes.

[0164] Other terms are defined herein within the description of the various aspects of the disclosure.

[0165] All patents and other publications; including literature references, issued patents, published patent applications, and co-pending patent applications; cited throughout this application are expressly incorporated herein by reference for the purpose of describing and disclosing, for example, the methodologies described in such publications that might be used in connection with the technology described herein. These publications are provided solely for their disclosure prior to the filing date of the present application. Nothing in this regard should be construed as an admission that the inventors are not entitled to antedate such disclosure by virtue of prior disclosure or for any other reason. All statements as to the date or representation as to the contents of these documents is based on the information available to the applicants and does not constitute any admission as to the correctness of the dates or contents of these documents.

[0166] The description of embodiments of the disclosure is not intended to be exhaustive or to limit the disclosure to the precise form disclosed. While specific embodiments of, and examples for, the disclosure are described herein for illustrative purposes, various equivalent modifications are possible within the scope of the disclosure, as those skilled in the relevant art will recognize. For example, while method steps or functions are presented in a given order, alternative embodiments may perform functions in a different order, or functions may be performed substantially concurrently. The teachings of the disclosure provided herein can be applied to other procedures or methods as appropriate. The various embodiments described herein can be combined to provide further embodiments. Aspects of the disclosure can be modified, if necessary, to employ the compositions, functions and concepts of the above references and application to provide yet further embodiments of the disclosure. Moreover, due to biological functional equivalency considerations, some changes can be made in protein structure without affecting the biological or chemical action in kind or amount. These and other changes can be made to the disclosure in light of the detailed description. All such modifications are intended to be included within the scope of the appended claims.

[0167] Specific elements of any of the foregoing embodiments can be combined or substituted for elements in other embodiments. Furthermore, while advantages associated with certain embodiments of the disclosure have been described in the context of these embodiments, other embodiments may also exhibit such advantages, and not all embodiments need necessarily exhibit such advantages to fall within the scope of the disclosure.

### II. Expression of a FVIII Protein from a ceDNA Vector

[0168] The technology described herein is directed in general to the expression and/or production of FVIII protein in a cell from a non-viral DNA vector, e.g., a ceDNA vector as described herein. ceDNA vectors for expression of FVIII protein are described in the section entitled “ceDNA vectors in general”. In particular, ceDNA vectors for expression of FVIII protein comprise a pair of ITRs (e.g., symmetric or asymmetric as described herein) and between the ITR pair, a nucleic acid encoding an FVIII protein operatively linked to a promoter or regulatory sequence. A distinct advantage of ceDNA vectors for expression of FVIII protein over traditional AAV vectors, and even lentiviral vectors, is that there is no size constraint for the nucleic acid sequences, e.g., heterologous nucleic acid sequences, encoding a desired protein. Even a full length 6.8 kb FVIII protein can be expressed from a single ceDNA vector. Thus, the ceDNA vectors described herein can be used to express a therapeutic FVIII protein in a subject in need thereof, e.g., a subject with hemophilia A.

[0169] As one will appreciate, the ceDNA vector technologies can be adapted to any level of complexity or can be used in a modular fashion, where expression of different components of a FVIII protein can be controlled in an independent manner. For example, it is specifically contemplated that the ceDNA vector technologies described here can be as simple as using a single ceDNA vector to express a single gene sequence (e.g., a FVIII protein) or can be as complex as using multiple ceDNA vectors, where each vector expresses multiple FVIII proteins or associated co-factors or accessory proteins that are each independently controlled by different promoters. The following embodiments are specifically contemplated and can adapted by one of skill in the art as desired.

[0170] In one embodiment, a single ceDNA vector can be used to express a single component of an FVIII protein. Alternatively, a single ceDNA vector can be used to express multiple components (e.g., at least 2) of a FVIII protein under the control of a single promoter (e.g., a strong promoter), optionally using an IRES sequence(s) to ensure appropriate expression of each of the components, e.g., co-factors or accessory proteins.

[0171] As one of skill in the art will appreciate, it is often desirable to express components of a FVIII protein at different expression levels, thus controlling the stoichiometry of the individual components expressed to ensure efficient FVIII protein folding and combination in the cell. Additional variations of ceDNA vector technologies can be envisioned by one of skill in the art or can be adapted from protein production methods using conventional vectors.

### A. Nucleic Acids

[0172] The characterization and development of nucleic acid molecules for potential therapeutic use are provided herein. According to some embodiments, the nucleic acids for therapeutic use encode a FVIII protein. In some embodiments, chemical modification of oligonucleotides for the purpose of altered and improved in vivo properties (delivery, stability, lifetime, folding, target specificity), as well as their biological function and mechanism that directly correlate with therapeutic application, are described where appropriate.

[0173] The therapeutic nucleic acid described herein is a closed ended double stranded DNA, e.g., ceDNA. A distinct advantage of ceDNA vectors for expression of a therapeutic protein over traditional AAV vectors, and even lentiviral vectors, is that there is no size constraint for the nucleic acid sequences, e.g., heterologous nucleic acid sequences, encoding a desired protein. Thus, ceDNA vectors can be used to express a FVIII protein in a subject in need thereof.

[0174] In general, a ceDNA vector for expression of a FVIII as disclosed herein, comprises in the 5′ to 3′ direction: a first adeno-associated virus (AAV) inverted terminal repeat (ITR), a nucleic acid sequence of interest (for example an expression cassette as described herein) and a second AAV ITR. The ITR sequences selected from any of: (i) at least one WT ITR and at least one modified AAV inverted terminal repeat (mod-ITR) (e.g., asymmetric modified ITRs); (ii) two modified ITRs where the mod-ITR pair have a different three-dimensional spatial organization with respect to each other (e.g., asymmetric modified ITRs), or (iii) symmetrical or substantially symmetrical WT-WT ITR pair, where each WT-ITR has the same three-dimensional spatial organization, or (iv) symmetrical or substantially symmetrical modified ITR pair, where each mod-ITR has the same three-dimensional spatial organization.

[0175] In some embodiments, a transgene encoding the FVIII protein can also encode a secretory sequence so that the FVIII protein is directed to the Golgi Apparatus and Endoplasmic Reticulum where the FVIII protein is folded into the correct conformation by chaperone molecules as it passes through the ER and out of the cell. Exemplary secretory sequences include, but are not limited to VH-02 (SEQ ID NO: 88) and VK-A26 (SEQ ID NO: 89) and Igκ Kβ signal sequence (SEQ ID NO: 548), as well as a Glue secretory signal that allows the tagged protein to be secreted out of the cytosol, TMD-ST secretory sequence, that directs the tagged protein to the Golgi.

[0176] Regulatory switches can also be used to fine tune the expression of the FVIII protein so that the FVII protein is expressed as desired, including but not limited to, expression of the FVIII protein at a desired expression level or amount, or alternatively, when there is the presence or absence of particular signal, including a cellular signaling event. For instance, as described herein, expression of the FVIII protein from the ceDNA vector can be turned on or turned off when a particular condition occurs, as described herein in the section entitled Regulatory Switches.

[0177] For example, and for illustration purposes only, FVIII proteins can be used to turn off undesired reaction, such as too high a level of production of the FVIII protein. The FVIII gene can contain a signal peptide marker to bring the FVIII protein to the desired cell. However, in either situation it can be desirable to regulate the expression of the FVIII protein. ceDNA vectors readily accommodate the use of regulatory switches.

[0178] A distinct advantage of ceDNA vectors over traditional AAV vectors, and even lentiviral vectors, is that there is no size constraint for the nucleic acid sequence encoding the FVIII protein. Thus, even a full-length FVIII, as well as optionally any co-factors or assessor proteins can be expressed from a single ceDNA vector. In addition, depending on the necessary stiochemistry one can express multiple segments of the same FVIII protein, and can use same or different promoters, and can also use regulatory switches to fine tune expression of each region. For example, a ceDNA vector that comprises a dual promoter system can be used, so that a different promoter is used for each domain of the FVIII protein. Use of a ceDNA plasmid to produce the FVIII protein can include a unique combination of promoters for expression of the domains of the FVIII protein that results in the proper ratios of each domain for the formation of functional FVIII protein. Accordingly, in some embodiments, a ceDNA vector can be used to express different regions of FVIII protein separately (e.g., under control of a different promoter).

[0179] In another embodiment, the FVIII protein expressed from the ceDNA vectors further comprises an additional functionality, such as fluorescence, enzyme activity, secretion signal or immune cell activator.

[0180] In some embodiments, the ceDNA encoding the FVIII protein can further comprise a linker domain, for example. As used herein “linker domain” refers to an oligo- or polypeptide region from about 2 to 100 amino acids in length, which links together any of the domains/regions of the FVIII protein as described herein. In some embodiment, linkers can include or be composed of flexible residues such as glycine and serine so that the adjacent protein domains are free to move relative to one another. Longer linkers may be used when it is desirable to ensure that two adjacent domains do not sterically interfere with one another. Linkers may be cleavable or non-cleavable. Examples of cleavable linkers include 2A linkers (for example T2A), 2A-like linkers or functional equivalents thereof and combinations thereof. The linker can be a linker region is T2A derived from Thosea asigna virus.

[0181] In some embodiments, a transgene encoding the FVIII protein can also include a signal sequence. In some embodiments, a transgene encoding the FVIII protein can have It is well within the abilities of one of skill in the art to take a known and/or publically available protein sequence of FVIII, and reverse engineer a cDNA sequence to encode such a protein. The cDNA can then be codon optimized to match the intended host cell and inserted into a ceDNA vector as described herein.

B. ceDNA Vectors Expressing FVIII Protein

[0182] A ceDNA vector for expression of FVIII protein having one or more sequences encoding a desired FVIII can comprise regulatory sequences such as promoters, secretion signals, polyA regions, and enhancers. At a minimum, a ceDNA vector comprises one or more nucleic acid sequences, e.g., heterologous nucleic acid sequences, encoding a FVIII protein.

[0183] In order to achieve highly efficient and accurate FVIII protein assembly, it is specifically contemplated in some embodiments that the FVIII protein comprise an endoplasmic reticulum ER leader sequence to direct it to the ER, where protein folding occurs. For example, a sequence that directs the expressed protein(s) to the ER for folding.

[0184] In some embodiments, a cellular or extracellular localization signal (e.g., secretory signal, nuclear localization signal, mitochondrial localization signal, etc.) is comprised in the ceDNA vector to direct the secretion or desired subcellular localization of FVIII such that the FVIII protein can bind to intracellular target(s) (e.g., an intrabody) or extracellular target(s). In some embodiments, a FVIII sequence may contain a mutation that enhances FVIII secretion out of the ER. For example, FVIII secretion requires high levels of intracellular ATP, consistent with an ATP-dependent release from BiP. Mutation of Phe at position 309 to Ser or Ala (F309S) enhances the secretion of functional FVIII and reduced its ATP dependence. (Swaroop et al., J. Biol. Chem (1997) 272:27428-34).

[0185] In some embodiments, a ceDNA vector for expression of FVIII protein as described herein permits the assembly and expression of any desired FVIII protein in a modular fashion. As used herein, the term “modular” refers to elements in a ceDNA expressing plasmid that can be readily removed from the construct. For example, modular elements in a ceDNA-generating plasmid comprise unique pairs of restriction sites flanking each element within the construct, enabling the exclusive manipulation of individual elements. Thus, the ceDNA vector platform can permit the expression and assembly of any desired FVIII ORF with any desired cis-acting elements such as enhancer(s), promoters, introns, 5′-UTR, 3′-UTR, poly-A, etc. Provided herein in various embodiments are ceDNA plasmid vectors that can reduce and/or minimize the amount of manipulation required to assemble a desired ceDNA vector encoding FVIII protein.

C. Exemplary FVIII Proteins Expressed by ceDNA Vectors

[0186] In particular, a ceDNA vector for expression of FVIII protein as disclosed herein can encode, for example, but is not limited to, FVIII proteins, as well as variants, and/or active fragments thereof, for use in the treatment, prophylaxis, and/or amelioration of one or more symptoms of hemophilia A. In one aspect, the hemophilia A is a human hemophilia A.

[0187] (i) FVIII Therapeutic Proteins and Fragments Thereof

[0188] Essentially any version of the FVIII therapeutic protein or fragment thereof (e.g., functional fragment) can be encoded by and expressed in and from a ceDNA vector as described herein. One of skill in the art will understand that FVIII therapeutic protein includes all splice variants and orthologs of the FVIII protein. FVIII therapeutic protein includes intact molecules as well as fragments (e.g., functional) thereof. According to embodiments of the present disclosure, nucleic acids encoding particular FVIII proteins are set forth in Table 1A.

[0189] Factor VIII

[0190] Factor VIII is the nonenzymatic cofactor to the activated clotting factor IX (FIXa), which, when proteolytically activated, interacts with FIXa to form a tight noncovalent complex that binds to and activates factor X (FX).

[0191] The Factor VIII gene or protein can also be referred to as F8, Coagulation Factor VIII, Procoagulant Component, Antihemophilic Factor, F8C, AHF, DXS1253E, FVIII, HEMA, or F8B. Expression of the Factor VIII gene is tissue-specific and is mostly observed in liver cells. The highest level of the mRNA and Factor VIII proteins has been detected in liver sinusoidal cells; significant amounts of Factor VIII are also present in hepatocytes and in Kupffer cells (resident macrophages of liver sinusoids). Moderate levels of Factor VIII protein are detectable in the serum and plasma. Low to moderate levels of Factor VIII protein are expressed in fetal brain, retina, kidney and testis.

[0192] Factor VIII mRNA is expressed throughout many tissues of the body, including bone marrow, whole blood, white blood cells, lymph nodes, thymus, brain, cerebral cortex, cerebellum, retina, spinal cord, tibial nerve, heart, artery, smooth muscle, skeletal muscle, small intestine, colon, adipocytes, kidney, liver, lung, spleen, stomach, esophagus, bladder, pancreas, thyroid, salivary gland, adrenal gland, pituitary gland, breast, skin, ovary, uterus, placenta, prostate, and testis. The FVIII gene localized on the long arm of the X chromosome occupies a region approximately 186 kbp long and consists of 26 exons (69-3,106 bp) and introns (from 207 bp to 32.4 kbp). The total length of the coding sequence of this gene is 9 kbp.

[0193] The mature factor VIII polypeptide comprises the A1-A2-B-A3-C1-C2 structural domains. Three acidic subdomains, which are denoted as a1-a3-A1(a1)-A2(a2)-B-(a3)A3-C1-C2, localize at the boundaries of A domains and play a significant role in the interaction between FVIII and other proteins (in particular, with thrombin). Mutations in these subdomains reduce the level of factor VIII activation by thrombin (see FIG. 9 for FVIII processing steps).

[0194] The factor VIII protein (Coagulation factor VIII isoform) is a preproprotein [Homo sapiens]; Accession number: NP_000123.1 (2351 aa) and has the sequence as set forth in SEQ ID NO: 492. According to some embodiments, an FVIII protein contemplated herein can be a modified FVIII protein. According to further embodiments, the FVIII protein can have the B-domain deleted and comprise the amino acid sequence set forth in SEQ ID NO: 555).

[0195] According to some embodiments, FVIII expressed by some of the FVIII-ceDNA vectors disclosed herein is AFSTYLA®; recombinant, single chain coagulation factor VIII (rVIII-SingleChain); lonoctocog alfa; CAS Registry Number: 1388129-63-2.

[0196] AFSTYLA® is a single chain recombinant factor VIII (FVIII) that most of the B-domain occurring in wild-type, full-length FVIII and 4 amino acids of the adjacent acidic A3 domain are removed (e.g., amino acids 765 to 1652 of full-length FVIII).

[0197] It is to be understood that the amino acid D (aspartic acid) at position 56 in SEQ ID NO: 555 above can be freely substituted with V (valine) as a wild-type variant and that any nucleotide sequence disclosed herein for FVIII-ceDNA ORF is to be contemplated to include corresponding nucleic acid sequence(s) for the valine variant at position 56.

[0198] Expression of FVIII therapeutic protein or fragment thereof from a ceDNA vector can be achieved both spatially and temporally using one or more inducible or repressible promoters, or tissue specific promoters (e.g., synthetic liver specific promoters like TTR promoters (TTRm), CpG minimized hAAT promoters described herein), as known in the art or described herein, including regulatory switches as described herein.

[0199] In one embodiment, FVIII therapeutic protein can be an “therapeutic protein variant,” which refers to the FVIII therapeutic protein having an altered amino acid sequence, composition or structure as compared to its corresponding native FVIII therapeutic protein. In one embodiment, FVIII is a functional version (e.g., wild-type FVIII protein for D56V variant described above). It may also be useful to express a mutant version of FVIII protein such as a point mutation (F309 mutation) or deletion mutation (e.g., B domain deleted and/or single chain recombinant FVIII) as described in many examples herein. FVIII therapeutic protein expressed from the ceDNA vectors may further comprise a sequence/moiety that confers an additional functionality, such as fluorescence, enzyme activity, or secretion signal. In one embodiment, an FVIII therapeutic protein variant comprises a non-native tag sequence for identification (e.g., an immunotag) to allow it to be distinguished from endogenous FVIII therapeutic protein in a recipient host cell.

[0200] According to some embodiments, open reading frames (ORF) of the FVIII ceDNA vectors disclosed herein are codon optimized.

[0201] According to some other embodiments, the FVIII ceDNA vector is CpG minimized. For example, enhancers, promoters, 5′UTR, spacers, introns, 3′UTR, and WPRE sequences in the FVIII ceDNA vectors can be modified to have minimized level of CpG to ensure the robust expression of the vector.

[0202] In one embodiment, the FVIII therapeutic protein encoding sequence can be derived from an existing host cell or cell line, for example, by reverse transcribing mRNA obtained from the host and amplifying the sequence using PCR.

[0203] (ii) ceDNA Vectors Expressing FVIII Therapeutic Protein

[0204] A ceDNA vector having one or more sequences encoding a desired FVIII therapeutic protein can comprise regulatory sequences such as promoters, secretion signals, introns, polyA regions, and enhancers to maximize expression of the FVIII therapeutic protein when delivered to a desired cell or tissue. At a minimum, a ceDNA vector comprises one or more nucleic acid sequences encoding the FVIII therapeutic protein or functional fragment thereof. In one embodiment, the ceDNA vector comprises an FVIII sequence set forth in any one of SEQ ID NOs: 71-183, 556 and 626-633.

[0205] According to some aspects, the disclosure provides a ceDNA vector comprising at least one nucleic acid sequence between flanking inverted terminal repeats (ITRs), wherein at least one nucleic acid sequence encodes at least one FVIII protein, wherein the at least one nucleic acid sequence that encodes at least one FVIII protein is selected from a sequence having at least 85%, at least 90%, at least 95%, at least 96%, at least 97%, at least 98%, or least 99% identity to any sequence in Table 1A (SEQ ID NOs: 71-183, 556 and 626-633). According to some embodiments, the at least one nucleic acid sequence that encodes at least one FVIII protein is at least 85%, at least 90%, at least 95%, at least 96%, at least 97%, at least 98%, or least 99% identical to SEQ ID NO: 556. According to some embodiments, the at least one nucleic acid sequence that encodes at least one FVIII protein consists of SEQ ID NO: 556. According to some embodiments, the at least one nucleic acid that encodes at least one FVIII protein comprises SEQ ID NO: 556, wherein SEQ ID NO: 556 further comprises one or more modifications. According to some embodiments, the at least one nucleic acid comprising SEQ ID NO: 556, further comprising one or more modifications comprises or consists of a sequence selected from any one of SEQ ID NOs: 627-633.

[0206] Table 1A provides sequence identifiers, descriptions of the codon optimized FVIII ORFs and the names used herein. Table 1B provides the corresponding GE numbers used herein for the names of FVIII ORFs.

TABLE 1A
Description of exemplary codon optimized FVIII ORF sequences, sequence identifiers and
names used herein

| SEQ ID | | |
|---|---|---|
| NO | Description | Name |
| 71 | Codon optimized hFVIII with 226aa/N6 B-domain as found in | hFVIII-226variant- |
| | ceDNA933 | F309S_CpGmin-codop_ORF |
| 72 | Codon optimized hFVIII with 226aa/N6 B-domain as found in | hFVIII-F309S-BD226- |
| | ceDNA1265 | Codop-run4-seq102 |
| 73 | Codon optimized hFVIII with 226aa/N6 B-domain as found in | hFVIII-F309S-BD226seq124 |
| | ceDNA1270 | |
| 74 | Codon optimized hFVIII with SC B-domain as found in | hFVIII-F309S-BD226- |
| | ceDNA1368 | Codop-run4-seq102-Afstyla- |
| | | BDD-F309 |
| 75 | Codon optimized hFVIII with SC B-domain and F309S | hFVIII-F309S-BD226- |
| | encoding mutation as found in ceDNA1367 | Codop-run4-seq102-Afstyla- |
| | | BDD |
| 76 | Codon optimized hFVIII with SC B-domain as found in | hFVIII-F309S-BD226seq124 |
| | ceDNA1374 | Afstyla-BDD-F309 |
| 77 | Codon optimized hFVIII with SC B-domain and F309S | hFVIII-F309S-BD226seq |
| | encoding mutation as found in ceDNA1373 | 124-Afstyla-BDD |
| 78 | Codon optimized hFVIII with SC B-domain as found in | FVIII-SC_0CpG_1_ORF |
| | ceDNA1918 | |
| 79 | Codon optimized hFVIII with SC B-domain as found in | FVIII-SC_0CpG_6_ORF |
| | ceDNA1919 | |
| 80 | Codon optimized hFVIII with SC B-domain as found in | FVIII-SC_0CpG_8_ORF |
| | ceDNA1920 | |
| 81 | Codon optimized hFVIII with SC B-domain as found in | FVIII-SC_5_ORF |
| | ceDNA1921 | |
| 82 | Codon optimized hFVIII with SC B-domain as found in | FVIII-SC_5k_wt3_3_ORF |
| | ceDNA1922 | |
| 83 | Codon optimized hFVIII with SC B-domain as found in | FVIII-SC_5k_wt3_5_ORF |
| | ceDNA1923 | |
| 84 | Codon optimized hFVIII with SC B-domain and F309S | FVIII-SC_0CpG_1_F309S |
| | encoding mutation as found in ceDNA1927 | |
| 85 | Codon optimized hFVIII with SC B-domain and F309S | FVIII-SC_0CpG_6_F309S |
| | encoding mutation as found in ceDNA1928 | |
| 86 | Codon optimized hFVIII with SC B-domain and F309S | FVIII-SC_0CpG_8_F309S |
| | encoding mutation as found in ceDNA1929 | |
| 87 | Codon optimized hFVIII with SC B-domain and F309S | FVIII-SC_5_F309S |
| | encoding mutation as found in ceDNA1930 | |
| 88 | Codon optimized hFVIII with SC B-domain and F309S | FVIII-SC_5k_wt3_3_F309S |
| | encoding mutation as found in ceDNA1931 | |
| 89 | Codon optimized hFVIII with SC B-domain and F309S | FVIII-SC_5k_wt3_5_F309S |
| | encoding mutation as found in ceDNA1932 | |
| 90 | Codon optimized hFVIII with SC B-domain and F309S | FVIII-SC_5k_wt3_5- |
| | encoding mutation as found in ceDNA1933 | 0CpG_6 |
| | | F309S hybrid |
| 91 | Sequence of Factor VIII ORF (GE-707) with signal seqeunce | FVIII_1368_ORF_ |
| | removed | mat_peptide |
| 92 | Sequence of Factor VIII ORF (GE-715) with signal seqeunce | FVIII_1374 |
| | removed | ORF_mat_peptide |
| 93 | hFVIII ORF with SC B-domain | hFVIII-Wt-Afstyla BDD |
| 94 | Codon optimized hFVIII with SC B-domain and F309S | FVIII-SC_1367_miniF8 |
| | encoding mutation. Intron engineered into between Exon1 and | 50/100 |
| | Exon2 | |
| 95 | Codon optimized hFVIII with SC B-domain and F309S | FVIII-SC_1367_miniF8_ |
| | encoding mutation. Intron engineered into between Exon1 and | 50/200 |
| | Exon2 | |
| 96 | Codon optimized hFVIII with SC B-domain and F309S | FVIII-SC_1367_miniF8_ |
| | encoding mutation. Intron engineered into between Exon1 and | 200/200 |
| | Exon2 | |
| 97 | Codon optimized hFVIII with SC B-domain and F309S | FVIII-SC_1367_miniF8_ |
| | encoding mutation. Intron engineered into between Exon1 and | 500/500 |
| | Exon2 | |
| 98 | Codon optimized hFVIII with SC B-domain and F309S | FVIII-SC_1367_HBB_ |
| | encoding mutation. Intron engineered into between Exon1 and | intron 1 |
| | Exon2 | |
| 99 | Codon optimized hFVIII with SC B-domain and F309S | FVIII-SC_1367_ |
| | encoding mutation. Intron engineered into between Exon1 and | Embedded_HCR1_ |
| | Exon2 | footprint123 |
| 100 | Codon optimized hFVIII with SC B-domain and F309S | FVIII-SC_1367_ |
| | encoding mutation. Intron engineered into between Exon1 and | Embedded_ProEnh |
| | Exon2 | |
| 101 | Codon optimized hFVIII with SC B-domain and F309S | FVIII-SC_1367_ |
| | encoding mutation. Intron engineered into between Exon1 and | Embedded_enhancer_ |
| | Exon2 | HNF_array |
| 102 | Codon optimized hFVIII with SC B-domain and F309S | FVIII-SC_1367_F8_intron8 |
| | encoding mutation. Intron engineered into between Exon1 and | |
| | Exon2 | |
| 103 | Codon optimized hFVIII with SC B-domain and F309S | FVIII-SC_1367_F8_intron16 |
| | encoding mutation. Intron engineered into between Exon1 and | |
| | Exon2 | |
| 104 | Codon optimized hFVIII with SC B-domain and F309S | FVIII-SC_1367_ |
| | encoding mutation. Intron engineered into between Exon1 and | MVM_intron |
| | Exon2 | |
| 105 | Codon optimized hFVIII with SC B-domain and F309S | FVIII- |
| | encoding mutation. Intron engineered into between Exon1 and | SC_1367::33bpFlanks_miniF |
| | Exon2 | 8_50/100 |
| 106 | Codon optimized hFVIII with SC B-domain and F309S | FVIII- |
| | encoding mutation. Intron engineered into between Exon1 and | SC_1367::33bpFlanks_miniF |
| | Exon2 | 8_200/200 |
| 107 | Codon optimized hFVIII with SC B-domain and F309S | FVIII- |
| | encoding mutation. Intron engineered into between Exon1 and | SC_1367::33bpFlanks_HBB_ |
| | Exon2 | intron1 |
| 108 | Codon optimized hFVIII with SC B-domain and F309S | FVIII- |
| | encoding mutation. Intron engineered into between Exon1 and | SC_1367::33bpFlanks_F8_in |
| | Exon2 | ron8 |
| 109 | Codon optimized hFVIII with SC B-domain and F309S | FVIII- |
| | encoding mutation. Intron engineered into between Exon1 and | SC_1367::33bpFlanks_no |
| | Exon2 | intron |
| 110 | Codon optimized hFVIII with SC B-domain and F309S | FVIII-SC_1373_miniF8_ |
| | encoding mutation. Intron engineered into between Exon1 and | 50/100 |
| | Exon2 | |
| 111 | Codon optimized hFVIII with SC B-domain and F309S | FVIII-SC_1373_miniF8_ |
| | encoding mutation. Intron engineered into between Exon1 and | 50/200 |
| | Exon2 | |
| 112 | Codon optimized hFVIII with SC B-domain and F309S | FVIII-SC_1373_miniF8_ |
| | encoding mutation. Intron engineered into between Exon1 and | 200/200 |
| | Exon2 | |
| 113 | Codon optimized hFVIII with SC B-domain and F309S | FVIII-SC_1373_miniF8_ |
| | encoding mutation. Intron engineered into between Exon1 and | 500/500 |
| | Exon2 | |
| 114 | Codon optimized hFVIII with SC B-domain and F309S | FVIII-SC_1373_ |
| | encoding mutation. Intron engineered into between Exon1 and | HBB_intron1 |
| | Exon2 | |
| 115 | Codon optimized hFVIII with SC B-domain and F309S | FVIII-SC_1373_ |
| | encoding mutation. Intron engineered into between Exon1 and | Embedded_HCR1_ |
| | Exon2 | footprint123 |
| 116 | Codon optimized hFVIII with SC B-domain and F309S | FVIII-SC_1373_ |
| | encoding mutation. Intron engineered into between Exon1 and | Embedded_ProEnh |
| | Exon2 | |
| 117 | Codon optimized hFVIII with SC B-domain and F309S | FVIII-SC_1373_ |
| | encoding mutation. Intron engineered into between Exon1 and | Embedded_enhancer_ |
| | Exon2 | HNF_array |
| 118 | Codon optimized hFVIII with SC B-domain and F309S | FVIII-SC_1373_ |
| | encoding mutation. Intron engineered into between Exon1 and | F8_intron8 |
| | Exon2 | |
| 119 | Codon optimized hFVIII with SC B-domain and F309S | FVIII-SC_1373_ |
| | encoding mutation. Intron engineered into between Exon1 and | F8_intron16 |
| | Exon2 | |
| 120 | Codon optimized hFVIII with SC B-domain and F309S | FVIII-SC_1373_ |
| | encoding mutation. Intron engineered into between Exon1 and | MVM_intron |
| | Exon2 | |
| 121 | Codon optimized hFVIII with SC B-domain and F309S | FVIII- |
| | encoding mutation. Intron engineered into between Exon1 and | SC_1373::33bpFlanks_miniF |
| | Exon2 | 8_50/100 |
| 122 | Codon optimized hFVIII with SC B-domain and F309S | FVIII- |
| | encoding mutation. Intron engineered into between Exon1 and | SC_1373::33bpFlanks_miniF |
| | Exon2 | 8_200/200 |
| 123 | Codon optimized hFVIII with SC B-domain and F309S | FVIII- |
| | encoding mutation. Intron engineered into between Exon1 and | SC_1373::33bpFlanks_HBB_ |
| | Exon2 | intron 1 |
| 124 | Codon optimized hFVIII with SC B-domain and F309S | FVIII- |
| | encoding mutation. Intron engineered into between Exon1 and | SC_1373::33bpFlanks_F8_in |
| | Exon2 | ron8 |
| 125 | Codon optimized hFVIII with SC B-domain and F309S | FVIII- |
| | encoding mutation. Intron engineered into between Exon1 and | SC_1373::33bpFlanks_no |
| | Exon2 | intron |
| 126 | Codon optimized hFVIII with SC B-domain and F309S | FVIII_SC_F309S_ |
| | encoding mutation | GeneD_v4 |
| 127 | Codon optimized hFVIII with SC B-domain | FVIII_SC_F309_ |
| | | GeneD_v4 |
| 128 | Codon optimized hFVIII with SC B-domain and F309S | FVIII_SC_F309S_ |
| | encoding mutation | codop_3b |
| 129 | Codon optimized hFVIII with SC B-domain | FVIII_SC_F309_ |
| | | codop_3b |
| 130 | Codon optimized hFVIII with SC B-domain and F309S | FVIII_SC_F309S_ |
| | encoding mutation | GeneD_v3 |
| 131 | Codon optimized hFVIII with SC B-domain and F309S | FVIII_SC_F309S |
| | encoding mutation | GeneD_v2 |
| 132 | Codon optimized hFVIII with SC B-domain and F309S | FVIII_SC_F309S_ |
| | encoding mutation | codop_7b |
| 133 | Codon optimized hFVIII with SC B-domain and F309S | FVIII_SC_F309S_ |
| | encoding mutation | codop_6b |
| 134 | Codon optimized hFVIII with SC B-domain and F309S | FVIII_SC_F309S_ |
| | encoding mutation | codop_1b |
| 135 | Codon optimized hFVIII with SC B-domain | FVIII_SC_F309_ |
| | | GeneD_v3 |
| 136 | Codon optimized hFVIII with SC B-domain | FVIII_SC_F309_ |
| | | GeneD_v2 |
| 137 | Codon optimized hFVIII with SC B-domain | FVIII_SC_F309_ |
| | | codop_7b |
| 138 | Codon optimized hFVIII with SC B-domain | FVIII_SC_F309_ |
| | | codop_6b |
| 139 | Codon optimized hFVIII with SC B-domain | FVIII_SC_F309_ |
| | | codop_1b |
| 140 | FVIII ORF from 1368 (Afstyla BDD) with heterologous | FVIII_1368ORF_ |
| | A1AT leader sequence | A1AT-SSv3 |
| 141 | FVIII ORF from 1374 (Afstyla BDD) with heterologous | FVIII_1374ORF_ |
| | typsinogen leader sequence | TRYP-SSv2 |
| 142 | FVIII ORF from 1374 (Afstyla BDD) with heterologous trans | FVIII_1374ORF_ |
| | Plasminogen Activator leader sequence | tPA-SSv1 |
| 143 | FVIII ORF from 1374 (Afstyla BDD) with synthetic leader | FVIII_1374ORF_ |
| | sequence | Secrecon-SSv2 |
| 144 | FVIII ORF from 1374 (Afstyla BDD) with synthetic leader | FVIII_1374ORF_ |
| | sequence | Secrecon-SSv1 |
| 145 | FVIII ORF from 1374 (Afstyla BDD) with heterologous | FVIII_1374ORF_ |
| | Fibroin-L leader sequence | Lonz-SSv2 |
| 146 | FVIII ORF from 1374 (Afstyla BDD) with heterologous IL2 | FVIII_1374ORF_ |
| | leader sequence | IL2-SSv1 |
| 147 | FVIII ORF from 1374 (Afstyla BDD) with heterologous | FVIII_1374ORF_ |
| | Gaussia leader sequence | Gaus-SSv1 |
| 148 | FVIII ORF from 1374 (Afstyla BDD) with heterologous | FVIII_1374ORF_ |
| | Chymotypsinogen leader sequence | CHY-SSv1 |
| 149 | FVIII ORF from 1374 (Afstyla BDD) with heterologous | FVIII_1374ORF_ |
| | Albumin leader sequence | ALB-SSv1 |
| 150 | FVIII ORF from 1374 (Afstyla BDD) with heterologous | FVIII_1374ORF_ |
| | A1AT leader sequence | A1AT-SSv3 |
| 151 | FVIII ORF from 1368 (Afstyla BDD) with heterologous | FVIII_1368ORF_ |
| | Trypsinogen leader sequence | TRYP-NS-struct-v2 |
| 152 | FVIII ORF from 1368 (Afstyla BDD) with heterologous | FVIII_1368ORF_ |
| | Trypsinogen leader sequence | TRYP-NS-CAI-v2 |
| 153 | FVIII ORF from 1368 (Afstyla BDD) with heterologous trans- | FVIII_1368ORF_tPA-NS- |
| | Plasminogen Activator leader sequence | struct |
| 154 | FVIII ORF from 1368 (Afstyla BDD) with heterologous trans- | FVIII_1368ORF_ |
| | Plasminogen Activator leader sequence | tPA-NS-CAI-v2 |
| 155 | FVIII ORF from 1368 (Afstyla BDD) with synthetic leader | FVIII_1368ORF_ |
| | sequence | Secrecon-v1-NS-struct-v1 |
| 156 | FVIII ORF from 1368 (Afstyla BDD) with synthetic leader | FVIII_1368ORF_ |
| | sequence | Secrecon-v1-NS-CAI-v2 |
| 157 | FVIII ORF from 1368 (Afstyla BDD) with heterologous | FVIII_1368ORF_ |
| | Fibroin-L leader sequence | Lonz-SSv2 |
| 158 | FVIII ORF from 1368 (Afstyla BDD) with heterologous | FVIII_1368ORF_ |
| | Fibroin-L leader sequence | Lonz-NS-struct-v3 |
| 159 | FVIII ORF from 1368 (Afstyla BDD) with heterologous | FVIII_1368ORF_ |
| | Fibroin-L leader sequence | Lonz-NS-CAI-v2 |
| 160 | FVIII ORF from 1368 (Afstyla BDD) with heterologous IL2 | FVIII_1368ORF_ |
| | leader sequence | IL2-NS-struct-v2 |
| 161 | FVIII ORF from 1368 (Afstyla BDD) with heterologous IL2 | FVIII_1368ORF_ |
| | leader sequence | IL2-NS-CAI |
| 162 | FVIII ORF from 1368 (Afstyla BDD) with heterologous | FVIII_1368ORF_ |
| | Gaussia leader sequence | Gaus-NS-struct-v2 |
| 163 | FVIII ORF from 1368 (Afstyla BDD) with heterologous | FVIII_1368ORF_ |
| | Gaussia leader sequence | Gaus-NS-CAI-v2 |
| 164 | FVIII ORF from 1368 (Afstyla BDD) with heterologous | FVIII_1368ORF_ |
| | Chymotrypsinogen leader sequence | CHY-NS-struct |
| 165 | FVIII ORF from 1368 (Afstyla BDD) with heterologous | FVIII_1368ORF_ |
| | Chymotrypsinogen leader sequence | CHY-NS-CAI-v2 |
| 166 | FVIII ORF from 1368 (Afstyla BDD) with heterologous | FVIII_1368ORF_ |
| | A1AT leader sequence | A1AT-NS-struct |
| 167 | FVIII ORF from 1368 (Afstyla BDD) with heterologous | FVIII_1368ORF_ |
| | A1AT leader sequence | A1AT-NS-CAI |
| 168 | FVIII ORF from 1368 (Afstyla BDD) with heterologous | FVIII-1368ORF_ |
| | hCD33 leader sequence | CD33-NS-struct-v2 |
| 169 | FVIII ORF from 1368 (Afstyla BDD) with heterologous | FVIII-1368ORF_ |
| | hCD33 leader sequence. | CD33-NS-CAI-v2 |
| 170 | FVIII ORF from 1368 (Afstyla BDD) with heterologous | FVIII-1368ORF_ |
| | Albumin leader sequence | ALB-NS-struct |
| 171 | FVIII ORF from 1368 (Afstyla BDD) with heterologous | FVIII-1368ORF_ |
| | Albumin leader sequence. | ALB-NS-CAI-v2 |
| 172 | FVIII ORF from 1368 (Afstyla BDD) with heterologous CD33 | FVIII_1368ORF_ |
| | leader sequence | CD33-SSv1 |
| 173 | FVIII ORF from 1374 (Afstyla BDD) with heterologous | FVIII_1374ORF_ |
| | A1AT leader sequence v2 | A1AT-SSv2 |
| 174 | FVIII ORF from 1368 (Afstyla BDD) with heterologous | FVIII_1368ORF_ |
| | Trypsinogen leader sequence | TRYP-SSv1 |
| 175 | FVIII ORF from 1368 (Afstyla BDD) with heterologous trans | FVIII_1368ORF_ |
| | plasminogen activator leader sequence | tPA-SSv1 |
| 176 | FVIII ORF from 1368 (Afstyla BDD) with heterologous | FVIII_1368ORF_ |
| | Secrecon leader sequence | Secrecon-SSv2 |
| 177 | FVIII ORF from 1368 (Afstyla BDD) with heterologous | FVIII_1368ORF_ |
| | Secrecon leader sequence | Secrecon-SSv1 |
| 178 | FVIII ORF from 1368 (Afstyla BDD) with heterologous | FVIII_1368ORF_ |
| | Fibroin-L leader sequence. | Lonz-SSv1 |
| 179 | FVIII ORF from 1368 (Afstyla BDD) with heterologous IL-2 | FVIII_1368ORF_ |
| | leader sequence | IL2-SSv1 |
| 180 | FVIII ORF from 1368 (Afstyla BDD) with heterologous | FVIII_1368ORF_ |
| | Gaussia leader sequence | Gaus-SSv1 |
| 181 | FVIII ORF from 1368 (Afstyla BDD) with heterologous | FVIII_1368ORF_ |
| | Chymotrypsin leader sequence | CHY-SSv1 |
| 182 | FVIII ORF from 1368 (Afstyla BDD) with heterologous | FVIII_1368ORF_ |
| | A1AT leader sequence | A1AT-SSv2 |
| 183 | FVIII ORF from 1368 (Afstyla BDD) with heterologous | FVIII-1368ORF_ |
| | Albumin leader sequence | ALB-SSv1 |
| 556 | FVIII ORF from 1651 (Afstyla BDD); reverts F309S mutation | hFVIII-F309S-BD226seq124 |
| | back to F309; expresss the equivalent amino acid sequence of | BDD-F309; also referred to |
| | SEQ ID NO: 555; | as hFVIII-F309S- |
| | | BD226seq124-Afstyla-BDD- |
| | | F309 |
| 626 | Modification of FVIII ORF from ceDNA-1651 ORF (SEQ ID | hFVIII-1651-ORF-dATG1 |
| | NO: 556). Ablation of 1st cryptic ATG start codon introduced | |
| | by codon optimization | |
| 627 | Modification of FVIII ORF from SEQ ID NO: 556. Ablation of | hFVIII-1651-ORF-dATG2 |
| | 1st and 2nd cryptic ATG start codon introduced by codon | |
| | optimization | |
| 628 | Modification of FVIII ORF from SEQ ID NO: 556. Ablation of | hFVIII-1651-ORF-dATG3 |
| | all three cryptic ATG start codons introduced by codon | |
| | optimization | |
| 629 | Modification of FVIII ORF from SEQ ID NO: 556. Ablation of | hFVIII-1651ORF-dATG2-3 |
| | 2nd and 3rd ATG cryptic start codons introduced by codon | |
| | optimization | |
| 630 | Modification of FVIII ORF from SEQ ID NO: 556. Ablation of | hFVIII-1651ORF- |
| | all three ATG cryptic start codons introduced by codon | dATG3_dCTG3_dTTG1 |
| | optimization, first three CTG cryptic start codons and first TTC | |
| | cryptic start codon | |
| 631 | Modification of FVIII ORF from SEQ ID NO: 556. Ablation o | hFVIII-1651-ORF- |
| | first ATG cryptic start codons introduced by codon | dATG1_dCTG3_dTTG1 |
| | optimization, first three CTG cryptic start codons and first TTC | |
| | cryptic start codon | |
| 632 | Modification of FVIII ORF from SEQ ID NO: 556. Ablation of | hFVIII-1651-ORF-dATG2- |
| | 2nd and 3rd ATG cryptic start codons, as well as first three | 3_dCTG3_dTTG1 |
| | CTG cryptic start codons and first TTG cryptic start codon | |
| 633 | Modification of FVIII ORF from SEQ ID NO: 556. Ablation o | hFVIII-1651-ORF-dATG2- |
| | 2nd and 3rd ATG cryptic start codons, as well as first three | 3_dCTG3_dTTG1_dCpG3 |
| | CTG cryptic start codons and first TTG cryptic start codon. | |
| | Ablation of three CpGs | |

TABLE 1B
General Element Numbers

| | | GE | |
|---|---|---|---|
| GE # | ORF Name | # | ORF Name |
| GE- | hFVIII-226variant-F309S_CpGmin- | GE- | FVIII-SC_1373::33bpFlanks_ |
| 364 | codop_ORF | 1201 | miniF8_50/100 |
| GE- | hFVIII-F309S-BD226-Codop-run4-seq102 | GE- | FVIII-SC_1373::33bpFlanks_ |
| 721 | | 1202 | miniF8_200/200 |
| GE- | hFVIII-F309S-BD226seq124 | GE- | FVIII-SC_1373::33bpFlanks_ |
| 776 | | 1203 | HBB_intron1 |
| GE- | hFVIII-F309S-BD226-Codop-run4-seq102- | GE- | FVIII-SC_1373::33bpFlanks_ |
| 707 | Afstyla-BDD-F309 | 1204 | F8_intron8 |
| GE- | hFVIII-F309S-BD226-Codop-run4-seq102- | GE- | FVIII-SC_1373::33bpFlanks_ |
| 706 | Afstyla-BDD | 1205 | no intron |
| GE | hFVIII-F309S-BD226seq124-Afstyla- | GE- | FVIII_SC_F309S_GeneD_v4 |
| 715 | BDD-F309 | 968 | |
| GE- | hFVIII-F309S-BD226seq124-Afstyla-BDD | GE- | FVIII_SC_F309_GeneD_v4 |
| 714 | | 967 | |
| GE- | FVIII-SC_0CpG_1_ORF | GE- | FVIII_SC_F309S_codop_3b |
| 1025 | | 966 | |
| GE- | FVIII-SC_0CpG_6_ORF | GE- | FVIII_SC_F309_codop_3b |
| 1026 | | 965 | |
| GE- | FVIII-SC_0CpG_8_ORF | GE- | FVIII_SC_F309S_GeneD_v3 |
| 1027 | | 964 | |
| GE- | FVIII-SC_5_ORF | GE | FVIII_SC_F309S_GeneD_v2 |
| 1028 | | 963 | |
| GE- | FVIII-SC_5k_wt3_3_ORF | GE- | FVIII_SC_F309S_codop_7b |
| 1029 | | 962 | |
| GE- | FVIII-SC_5k_wt3_5_ORF | GE- | FVIII_SC_F309S_codop_6b |
| 1030 | | 961 | |
| GE- | FVIII-SC_0CpG_1_F309S | GE- | FVIII_SC_F309S_codop_1b |
| 1032 | | 960 | |
| GE- | FVIII-SC_0CpG_6_F309S | GE- | FVIII_SC_F309_GeneD_v3 |
| 1033 | | 959 | |
| GE- | FVIII-SC_0CpG_8_F309S | GE- | FVIII_SC_F309_GeneD_v2 |
| 1034 | | 958 | |
| GE- | FVIII-SC_5_F309S | GE- | FVIII_SC_F309_codop_7b |
| 1035 | | 957 | |
| GE- | FVIII-SC_5k_wt3_3_F309S | GE- | FVIII_SC_F309_codop_6b |
| 1036 | | 956 | |
| GE- | FVIII-SC_5k_wt3_5_F309S | GE- | FVIII_SC_F309_codop_1b |
| 1037 | | 955 | |
| GE- | FVIII-SC_5k_wt3_5-0CpG_6_F309S | GE- | FVIII_1368ORF_A1AT-SSv3 |
| 1038 | hybrid | 848 | |
| GE- | FVIII_1368_ORF_mat_peptide | GE- | FVIII_1374ORF_TRYP-SSv2 |
| 1168 | | 847 | |
| GE- | FVIII_1374_ORF_mat_peptide | GE- | FVIII_1374ORF_tPA-SSv1 |
| 1169 | | 846 | |
| GE- | hFVIII-Wt-Afstyla BDD | GE- | FVIII_1374ORF_Secrecon-SSv2 |
| 712 | | 845 | |
| GE- | FVIII-SC_1367_miniF8_50/100 | GE- | FVIII_1374ORF_Secrecon-SSv1 |
| 1174 | | 844 | |
| GE- | FVIII-SC_1367_miniF8_50/200 | GE- | FVIII_1374ORF_Lonz-SSv2 |
| 1175 | | 843 | |
| GE- | FVIII-SC_1367_miniF8_200/200 | GE- | FVIII_1374ORF_IL2-SSv1 |
| 1176 | | 842 | |
| GE- | FVIII-SC_1367_miniF8_500/500 | GE- | FVIII_1374ORF_Gaus-SSv1 |
| 1177 | | 841 | |
| GE- | FVIII-SC_1367_HBB_intron1 | GE- | FVIII_1374ORF_CHY-SSv1 |
| 1178 | | 840 | |
| GE- | FVIII-SC_1367_Embedded_HCR1_ | GE- | FVIII_1374ORF_ALB-SSv1 |
| 1179 | footprint123 | 839 | |
| GE- | FVIII-SC_1367_Embedded_ProEnh | GE- | FVIII_1374ORF_A1AT-SSv3 |
| 1180 | | 838 | |
| GE- | FVIII-SC_1367_Embedded_enhancer_ | GE- | FVIII_1368ORF_TRYP-NS-struct-v2 |
| 1181 | HNF_array | 837 | |
| GE- | FVIII-SC_1367_F8_intron8 | GE- | FVIII_1368ORF_TRYP-NS-CAI-v2 |
| 1182 | | 836 | |
| GE- | FVIII-SC_1367_F8_intron16 | GE- | FVIII_1368ORF_tPA-NS-struct |
| 1183 | | 835 | |
| GE- | FVIII-SC_1367_MVM_intron | GE- | FVIII_1368ORF_tPA-NS-CAI-v2 |
| 1184 | | 834 | |
| GE- | FVIII-SC_1367::33bpFlanks_ | GE- | FVIII_1368ORF_Secrecon-v1-NS- |
| 1185 | miniF8_50/100 | 833 | struct-v1 |
| GE- | FVIII-SC_1367::33bpFlanks_ | GE- | FVIII_1368ORF_Secrecon-v1-NS- |
| 1186 | miniF8_200/200 | 832 | CAI-v2 |
| GE- | FVIII-SC_1367::33bpFlanks_HBB_intron1 | GE- | FVIII_1368ORF_Lonz-SSv2 |
| 1187 | | 831 | |
| GE- | FVIII-SC_1367::33bpFlanks_F8_intron8 | GE- | FVIII_1368ORF_Lonz-NS-struct-v3 |
| 1188 | | 830 | |
| GE- | FVIII-SC_1367::33bpFlanks_no intron | GE- | FVIII_1368ORF_Lonz-NS-CAI-v2 |
| 1189 | | 829 | |
| GE- | FVIII-SC_1373_miniF8_50/100 | GE- | FVIII_1368ORF_IL2-NS-struct-v2 |
| 1190 | | 828 | |
| GE- | FVIII-SC_1373_miniF8_50/200 | GE- | FVIII_1368ORF_IL2-NS-CAI |
| 1191 | | 827 | |
| GE- | FVIII-SC_1373_miniF8_200/200 | GE- | FVIII_1368ORF_Gaus-NS-struct-v2 |
| 1192 | | 826 | |
| GE- | FVIII-SC_1373_miniF8_500/500 | GE- | FVIII_1368ORF_Gaus-NS-CAI-v2 |
| 1193 | | 825 | |
| GE- | FVIII-SC_1373_HBB_intron1 | GE- | FVIII_1368ORF_CHY-NS-struct |
| 1194 | | 824 | |
| GE- | FVIII-SC_1373_Embedded_ | GE- | FVIII_1368ORF_CHY-NS-CAI-v2 |
| 1195 | HCR1_footprint123 | 823 | |
| GE- | FVIII-SC_1373_Embedded_ProEnh | GE- | FVIII_1368ORF_A1AT-NS-struct |
| 1196 | | 822 | |
| GE- | FVIII-SC_1373_Embedded_enhancer_ | GE- | FVIII_1368ORF_A1AT-NS-CAI |
| 1197 | HNF_array | 821 | |
| GE- | FVIII-SC_1373_F8_intron8 | GE- | FVIII-1368ORF_CD33-NS-struct-v2 |
| 1198 | | 820 | |
| GE- | FVIII-SC_1373_F8_intron16 | GE- | FVIII-1368ORF_CD33-NS-CAI-v2 |
| 1199 | | 819 | |
| GE- | FVIII-SC_1373_MVM_intron | GE- | FVIII-1368ORF_ALB-NS-struct |
| 1200 | | 818 | |
| GE- | hFVIII-F309S-BD226seq124-BDD-F309* | GE- | FVIII-1368ORF_ALB-NS-CAI-v2 |
| 715 | | 817 | |
| GE- | hFVIII-1651-ORF-dATG1 | GE- | FVIII_1368ORF_CD33-SSv1 |
| 1667 | | 816 | |
| GE- | hFVIII-1651-ORF-dATG2 | GE- | FVIII_1374ORF_A1AT-SSv2 |
| 1669 | | 815 | |
| GE- | hFVIII-1651-ORF-dATG3 | GE- | FVIII_1368ORF_TRYP-SSv1 |
| 1670 | | 814 | |
| GE- | hFVIII-1651ORF-dATG2-3 | GE- | FVIII_1368ORF_tPA-SSv1 |
| 1674 | | 813 | |
| GE- | hFVIII-1651ORF-dATG3_dCTG3_dTTG1 | GE- | FVIII_1368ORF_Secrecon-SSv2 |
| 1666 | | 812 | |
| GE- | hFVIII-1651-ORF- | GE- | FVIII_1368ORF_Secrecon-SSv1 |
| 1668 | dATG1_dCTG3_dTTG1 | 811 | |
| GE- | hFVIII-1651-ORF-dATG2- | GE- | FVIII_1368ORF_Lonz-SSv1 |
| 1675 | 3_dCTG3_dTTG1 | 810 | |
| GE- | hFVIII-1651-ORF-dATG2- | GE- | FVIII_1368ORF_IL2-SSv1 |
| 1698 | 3_dCTG3_dTTG1_dCpG3 | 809 | |
| | | GE- | FVIII_1368ORF_Gaus-SSv1 |
| | | 808 | |
| | | GE- | FVIII_1368ORF_CHY-SSv1 |
| | | 807 | |
| | | GE- | FVIII_1368ORF_A1AT-SSv2 |
| | | 806 | |
| | | GE- | FVIII-1368ORF_ALB-SSv1 |
| | | 805 | |

*The two names, hFVIII-F309S-BD226seq124-Afstyla-BDD-F309 and hFVIII-F309S-BD226seq124-
BDD-F309 refer to the same sequence GE-715 (SEQ ID NOs: 76 and 556).

[0207] According to some embodiments, nucleic acid sequence encoding a FVIII protein comprises a nucleic acid sequence at least about 85%, 90%, 95%, 96%, 97%, 98%, or 99% identical to SEQ ID NO: 71. According to some embodiments, the nucleic acid sequence encoding a FVIII protein comprises, or consists of, SEQ ID NOs: 71-183. In some embodiments, ceDNA vector having a nucleic acid sequence encoding FVIII (e.g., Table 1A) encodes Val (V) instead of Asp (D) at the amino acid position 75 of SEQ ID NO: 492.

[0208] According to some embodiments, nucleic acid sequence encoding a FVIII protein comprises a nucleic acid sequence at least about 85%, 90%, 95%, 96%, 97%, 98%, or 99% identical to SEQ ID NO: 71. According to some embodiments, the nucleic acid sequence encoding a FVIII protein comprises, or consists of, SEQ ID NO: 71. According to some embodiments, nucleic acid sequence encoding a FVIII protein comprises a nucleic acid sequence at least about 85%, 90%, 95%, 96%, 97%, 98%, or 99% identical to SEQ ID NO: 72. According to some embodiments, the nucleic acid sequence encoding a FVIII protein comprises, or consists of, SEQ ID NO: 72. According to some embodiments, nucleic acid sequence encoding a FVIII protein comprises a nucleic acid sequence at least about 85%, 90%, 95%, 96%, 97%, 98%, or 99% identical to SEQ ID NO: 73. According to some embodiments, the nucleic acid sequence encoding a FVIII protein comprises, or consists of, SEQ ID NO: 73. According to some embodiments, nucleic acid sequence encoding a FVIII protein comprises a nucleic acid sequence at least about 85%, 90%, 95%, 96%, 97%, 98%, or 99% identical to SEQ ID NO: 74. According to some embodiments, the nucleic acid sequence encoding a FVIII protein comprises, or consists of, SEQ ID NO: 74. According to some embodiments, nucleic acid sequence encoding a FVIII protein comprises a nucleic acid sequence at least about 85%, 90%, 95%, 96%, 97%, 98%, or 99% identical to SEQ ID NO: 75. According to some embodiments, the nucleic acid sequence encoding a FVIII protein comprises, or consists of, SEQ ID NO: 75. According to some embodiments, nucleic acid sequence encoding a FVIII protein comprises a nucleic acid sequence at least about 85%, 90%, 95%, 96%, 97%, 98%, or 99% identical to SEQ ID NO: 76. According to some embodiments, the nucleic acid sequence encoding a FVIII protein comprises, or consists of, SEQ ID NO: 76. According to some embodiments, nucleic acid sequence encoding a FVIII protein comprises a nucleic acid sequence at least about 85%, 90%, 95%, 96%, 97%, 98%, or 99% identical to SEQ ID NO: 77. According to some embodiments, the nucleic acid sequence encoding a FVIII protein comprises, or consists of, SEQ ID NO: 77. According to some embodiments, nucleic acid sequence encoding a FVIII protein comprises a nucleic acid sequence at least about 85%, 90%, 95%, 96%, 97%, 98%, or 99% identical to SEQ ID NO: 78. According to some embodiments, the nucleic acid sequence encoding a FVIII protein comprises, or consists of, SEQ ID NO: 78. According to some embodiments, nucleic acid sequence encoding a FVIII protein comprises a nucleic acid sequence at least about 85%, 90%, 95%, 96%, 97%, 98%, or 99% identical to SEQ ID NO: 79. According to some embodiments, the nucleic acid sequence encoding a FVIII protein comprises, or consists of, SEQ ID NO: 79. According to some embodiments, nucleic acid sequence encoding a FVIII protein comprises a nucleic acid sequence at least about 85%, 90%, 95%, 96%, 97%, 98%, or 99% identical to SEQ ID NO: 80. According to some embodiments, the nucleic acid sequence encoding a FVIII protein comprises, or consists of, SEQ ID NO: 80. According to some embodiments, nucleic acid sequence encoding a FVIII protein comprises a nucleic acid sequence at least about 85%, 90%, 95%, 96%, 97%, 98%, or 99% identical to SEQ ID NO: 81. According to some embodiments, the nucleic acid sequence encoding a FVIII protein comprises, or consists of, SEQ ID NO: 81. According to some embodiments, nucleic acid sequence encoding a FVIII protein comprises a nucleic acid sequence at least about 85%, 90%, 95%, 96%, 97%, 98%, or 99% identical to SEQ ID NO: 82. According to some embodiments, the nucleic acid sequence encoding a FVIII protein comprises, or consists of, SEQ ID NO: 82. According to some embodiments, nucleic acid sequence encoding a FVIII protein comprises a nucleic acid sequence at least about 85%, 90%, 95%, 96%, 97%, 98%, 99% identical to SEQ ID NO: 83. According to some embodiments, the nucleic acid sequence encoding a FVIII protein comprises, or consists of, SEQ ID NO: 83. According to some embodiments, nucleic acid sequence encoding a FVIII protein comprises a nucleic acid sequence at least about 85%, 90%, 95%, 96%, 97%, 98%, or 99% identical to SEQ ID NO: 84. According to some embodiments, the nucleic acid sequence encoding a FVIII protein comprises, or consists of, SEQ ID NO: 84. According to some embodiments, nucleic acid sequence encoding a FVIII protein comprises a nucleic acid sequence at least about 85%, 90%, 95%, 96%, 97%, 98%, 99% identical to SEQ ID NO: 85. According to some embodiments, the nucleic acid sequence encoding a FVIII protein comprises, or consists of, SEQ ID NO: 85. According to some embodiments, nucleic acid sequence encoding a FVIII protein comprises a nucleic acid sequence at least about 85%, 90%, 95%, 96%, 97%, 98%, or 99% identical to SEQ ID NO: 86. According to some embodiments, the nucleic acid sequence encoding a FVIII protein comprises, or consists of, SEQ ID NO: 86. According to some embodiments, nucleic acid sequence encoding a FVIII protein comprises a nucleic acid sequence at least about 85%, 90%, 95%, 96%, 97%, 98%, or 99% identical to SEQ ID NO: 87. According to some embodiments, the nucleic acid sequence encoding a FVIII protein comprises, or consists of, SEQ ID NO: 87. According to some embodiments, nucleic acid sequence encoding a FVIII protein comprises a nucleic acid sequence at least about 85%, 90%, 95%, 96%, 97%, 98%, or 99% identical to SEQ ID NO: 88. According to some embodiments, the nucleic acid sequence encoding a FVIII protein comprises, or consists of, SEQ ID NO: 88. According to some embodiments, nucleic acid sequence encoding a FVIII protein comprises a nucleic acid sequence at least about 85%, 90%, 95%, 96%, 97%, 98%, or 99% identical to SEQ ID NO: 89. According to some embodiments, the nucleic acid sequence encoding a FVIII protein comprises, or consists of, SEQ ID NO: 89. According to some embodiments, nucleic acid sequence encoding a FVIII protein comprises a nucleic acid sequence at least about 85%, 90%, 95%, 96%, 97%, 98%, or 99% identical to SEQ ID NO: 90. According to some embodiments, the nucleic acid sequence encoding a FVIII protein comprises, or consists of, SEQ ID NO: 90. According to some embodiments, nucleic acid sequence encoding a FVIII protein comprises a nucleic acid sequence at least about 85%, 90%, 95%, 96%, 97%, 98%, or 99% identical to SEQ ID NO: 91. According to some embodiments, the nucleic acid sequence encoding a FVIII protein comprises, or consists of, SEQ ID NO: 91. According to some embodiments, nucleic acid sequence encoding a FVIII protein comprises a nucleic acid sequence at least about 85%, 90%, 95%, 96%, 97%, 98%, or 99% identical to SEQ ID NO: 92. According to some embodiments, the nucleic acid sequence encoding a FVIII protein comprises, or consists of, SEQ ID NO: 92. According to some embodiments, nucleic acid sequence encoding a FVIII protein comprises a nucleic acid sequence at least about 85%, 90%, 95%, 96%, 97%, 98%, or 99% identical to SEQ ID NO: 93. According to some embodiments, the nucleic acid sequence encoding a FVIII protein comprises, or consists of, SEQ ID NO: 93. According to some embodiments, nucleic acid sequence encoding a FVIII protein comprises a nucleic acid sequence at least about 85%, 90%, 95%, 96%, 97%, 98%, or 99% identical to SEQ ID NO: 94. According to some embodiments, the nucleic acid sequence encoding a FVIII protein comprises, or consists of, SEQ ID NO: 94. According to some embodiments, nucleic acid sequence encoding a FVIII protein comprises a nucleic acid sequence at least about 85%, 90%, 95%, 96%, 97%, 98%, or 99% identical to SEQ ID NO: 95. According to some embodiments, the nucleic acid sequence encoding a FVIII protein comprises, or consists of, SEQ ID NO: 95. According to some embodiments, nucleic acid sequence encoding a FVIII protein comprises a nucleic acid sequence at least about 85%, 90%, 95%, 96%, 97%, 98%, or 99% identical to SEQ ID NO: 96. According to some embodiments, the nucleic acid sequence encoding a FVIII protein comprises, or consists of, SEQ ID NO: 96. According to some embodiments, nucleic acid sequence encoding a FVIII protein comprises a nucleic acid sequence at least about 85%, 90%, 95%, 96%, 97%, 98%, or 99% identical to SEQ ID NO: 97. According to some embodiments, the enhancer consists of SEQ ID NO: 97. According to some embodiments, nucleic acid sequence encoding a FVIII protein comprises a nucleic acid sequence at least about 85%, 90%, 95%, 96%, 97%, 98%, or 99% identical to SEQ ID NO: 98. According to some embodiments, the nucleic acid sequence encoding a FVIII protein comprises, or consists of, SEQ ID NO: 98. According to some embodiments, nucleic acid sequence encoding a FVIII protein comprises a nucleic acid sequence at least about 85%, 90%, 95%, 96%, 97%, 98%, or 99% identical to SEQ ID NO: 99. According to some embodiments, the nucleic acid sequence encoding a FVIII protein comprises, or consists of, SEQ ID NO: 99. According to some embodiments, nucleic acid sequence encoding a FVIII protein comprises a nucleic acid sequence at least about 85%, 90%, 95%, 96%, 97%, 98%, or 99% identical to SEQ ID NO: 100. According to some embodiments, the nucleic acid sequence encoding a FVIII protein comprises, or consists of, SEQ ID NO: 100. According to some embodiments, nucleic acid sequence encoding a FVIII protein comprises a nucleic acid sequence at least about 85%, 90%, 95%, 96%, 97%, 98%, or 99% identical to SEQ ID NO: 101. According to some embodiments, the nucleic acid sequence encoding a FVIII protein comprises, or consists of, SEQ ID NO: 101. According to some embodiments, nucleic acid sequence encoding a FVIII protein comprises a nucleic acid sequence at least about 85%, 90%, 95%, 96%, 97%, 98%, or 99% identical to SEQ ID NO: 102. According to some embodiments, the nucleic acid sequence encoding a FVIII protein comprises, or consists of, SEQ ID NO: 102. According to some embodiments, nucleic acid sequence encoding a FVIII protein comprises a nucleic acid sequence at least about 85%, 90%, 95%, 96%, 97%, 98%, or 99% identical to SEQ ID NO: 103. According to some embodiments, the nucleic acid sequence encoding a FVIII protein comprises, or consists of, SEQ ID NO: 103. According to some embodiments, nucleic acid sequence encoding a FVIII protein comprises a nucleic acid sequence at least about 85%, 90%, 95%, 96%, 97%, 98%, or 99% identical to SEQ ID NO: 104. According to some embodiments, the nucleic acid sequence encoding a FVIII protein comprises, or consists of, SEQ ID NO: 104. According to some embodiments, nucleic acid sequence encoding a FVIII protein comprises a nucleic acid sequence at least about 85%, 90%, 95%, 96%, 97%, 98%, or 99% identical to SEQ ID NO: 105. According to some embodiments, the nucleic acid sequence encoding a FVIII protein comprises, or consists of, SEQ ID NO: 105. According to some embodiments, nucleic acid sequence encoding a FVIII protein comprises a nucleic acid sequence at least about 85%, 90%, 95%, 96%, 97%, 98%, or 99% identical to SEQ ID NO: 106. According to some embodiments, the nucleic acid sequence encoding a FVIII protein comprises, or consists of, SEQ ID NO: 106. According to some embodiments, nucleic acid sequence encoding a FVIII protein comprises a nucleic acid sequence at least about 85%, 90%, 95%, 96%, 97%, 98%, or 99% identical to SEQ ID NO: 107. According to some embodiments, the nucleic acid sequence encoding a FVIII protein comprises, or consists of, SEQ ID NO: 107. According to some embodiments, nucleic acid sequence encoding a FVIII protein comprises a nucleic acid sequence at least about 85%, 90%, 95%, 96%, 97%, 98%, or 99% identical to SEQ ID NO: 108. According to some embodiments, the nucleic acid sequence encoding a FVIII protein comprises, or consists of, SEQ ID NO: 108. According to some embodiments, nucleic acid sequence encoding a FVIII protein comprises a nucleic acid sequence at least about 85%, 90%, 95%, 96%, 97%, 98%, or 99% identical to SEQ ID NO: 109. According to some embodiments, the nucleic acid sequence encoding a FVIII protein comprises, or consists of, SEQ ID NO: 109. According to some embodiments, nucleic acid sequence encoding a FVIII protein comprises a nucleic acid sequence at least about 85%, 90%, 95%, 96%, 97%, 98%, or 99% identical to SEQ ID NO: 110. According to some embodiments, the nucleic acid sequence encoding a FVIII protein comprises, or consists of, SEQ ID NO: 110. According to some embodiments, nucleic acid sequence encoding a FVIII protein comprises a nucleic acid sequence at least about 85%, 90%, 95%, 96%, 97%, 98%, or 99% identical to SEQ ID NO: 111. According to some embodiments, the nucleic acid sequence encoding a FVIII protein comprises, or consists of, SEQ ID NO: 111. According to some embodiments, nucleic acid sequence encoding a FVIII protein comprises a nucleic acid sequence at least about 85%, 90%, 95%, 96%, 97%, 98%, or 99% identical to SEQ ID NO: 112. According to some embodiments, the nucleic acid sequence encoding a FVIII protein comprises, or consists of, SEQ ID NO: 112. According to some embodiments, nucleic acid sequence encoding a FVIII protein comprises a nucleic acid sequence at least about 85%, 90%, 95%, 96%, 97%, 98%, or 99% identical to SEQ ID NO: 113. According to some embodiments, the nucleic acid sequence encoding a FVIII protein comprises, or consists of, SEQ ID NO: 113. According to some embodiments, nucleic acid sequence encoding a FVIII protein comprises a nucleic acid sequence at least about 85%, 90%, 95%, 96%, 97%, 98%, or 99% identical to SEQ ID NO: 114. According to some embodiments, the nucleic acid sequence encoding a FVIII protein comprises, or consists of, SEQ ID NO: 114. According to some embodiments, nucleic acid sequence encoding a FVIII protein comprises a nucleic acid sequence at least about 85%, 90%, 95%, 96%, 97%, 98%, or 99% identical to SEQ ID NO: 115. According to some embodiments, the nucleic acid sequence encoding a FVIII protein comprises, or consists of, SEQ ID NO: 115. According to some embodiments, nucleic acid sequence encoding a FVIII protein comprises a nucleic acid sequence at least about 85%, 90%, 95%, 96%, 97%, 98%, or 99% identical to SEQ ID NO: 116. According to some embodiments, the nucleic acid sequence encoding a FVIII protein comprises, or consists of, SEQ ID NO: 116. According to some embodiments, nucleic acid sequence encoding a FVIII protein comprises a nucleic acid sequence at least about 85%, 90%, 95%, 96%, 97%, 98%, or 99% identical to SEQ ID NO: 117. According to some embodiments, the nucleic acid sequence encoding a FVIII protein comprises, or consists of, SEQ ID NO: 117. According to some embodiments, nucleic acid sequence encoding a FVIII protein comprises a nucleic acid sequence at least about 85%, 90%, 95%, 96%, 97%, 98%, or 99% identical to SEQ ID NO: 118. According to some embodiments, the nucleic acid sequence encoding a FVIII protein comprises, or consists of, SEQ ID NO: 118. According to some embodiments, nucleic acid sequence encoding a FVIII protein comprises a nucleic acid sequence at least about 85%, 90%, 95%, 96%, 97%, 98%, or 99% identical to SEQ ID NO: 119. According to some embodiments, the nucleic acid sequence encoding a FVIII protein comprises, or consists of, SEQ ID NO: 119. According to some embodiments, nucleic acid sequence encoding a FVIII protein comprises a nucleic acid sequence at least about 85%, 90%, 95%, 96%, 97%, 98%, or 99% identical to SEQ ID NO: 120. According to some embodiments, the nucleic acid sequence encoding a FVIII protein comprises, or consists of, SEQ ID NO: 120. According to some embodiments, nucleic acid sequence encoding a FVIII protein comprises a nucleic acid sequence at least about 85%, 90%, 95%, 96%, 97%, 98%, or 99% identical to SEQ ID NO: 121. According to some embodiments, the nucleic acid sequence encoding a FVIII protein comprises, or consists of, SEQ ID NO: 121. According to some embodiments, nucleic acid sequence encoding a FVIII protein comprises a nucleic acid sequence at least about 85%, 90%, 95%, 96%, 97%, 98%, or 99% identical to SEQ ID NO: 122. According to some embodiments, the nucleic acid sequence encoding a FVIII protein comprises, or consists of, SEQ ID NO: 122. According to some embodiments, nucleic acid sequence encoding a FVIII protein comprises a nucleic acid sequence at least about 85%, 90%, 95%, 96%, 97%, 98%, or 99% identical to SEQ ID NO: 123. According to some embodiments, the nucleic acid sequence encoding a FVIII protein comprises, or consists of, SEQ ID NO: 123. According to some embodiments, nucleic acid sequence encoding a FVIII protein comprises a nucleic acid sequence at least about 85%, 90%, 95%, 96%, 97%, 98%, or 99% identical to SEQ ID NO: 124. According to some embodiments, the nucleic acid sequence encoding a FVIII protein comprises, or consists of, SEQ ID NO: 124. According to some embodiments, nucleic acid sequence encoding a FVIII protein comprises a nucleic acid sequence at least about 85%, 90%, 95%, 96%, 97%, 98%, or 99% identical to SEQ ID NO: 125. According to some embodiments, the nucleic acid sequence encoding a FVIII protein comprises, or consists of, SEQ ID NO: 125. According to some embodiments, nucleic acid sequence encoding a FVIII protein comprises a nucleic acid sequence at least about 85%, 90%, 95%, 96%, 97%, 98%, or 99% identical to SEQ ID NO: 126. According to some embodiments, the nucleic acid sequence encoding a FVIII protein comprises, or consists of, SEQ ID NO: 126. According to some embodiments, nucleic acid sequence encoding a FVIII protein comprises a nucleic acid sequence at least about 85%, 90%, 95%, 96%, 97%, 98%, or 99% identical to SEQ ID NO: 127. According to some embodiments, the nucleic acid sequence encoding a FVIII protein comprises, or consists of, SEQ ID NO: 127. According to some embodiments, nucleic acid sequence encoding a FVIII protein comprises a nucleic acid sequence at least about 85%, 90%, 95%, 96%, 97%, 98%, or 99% identical to SEQ ID NO: 128. According to some embodiments, the nucleic acid sequence encoding a FVIII protein comprises, or consists of, SEQ ID NO: 128. According to some embodiments, nucleic acid sequence encoding a FVIII protein comprises a nucleic acid sequence at least about 85%, 90%, 95%, 96%, 97%, 98%, or 99% identical to SEQ ID NO: 129. According to some embodiments, the nucleic acid sequence encoding a FVIII protein comprises, or consists of, SEQ ID NO: 129. According to some embodiments, nucleic acid sequence encoding a FVIII protein comprises a nucleic acid sequence at least about 85%, 90%, 95%, 96%, 97%, 98%, or 99% identical to SEQ ID NO: 130. According to some embodiments, the nucleic acid sequence encoding a FVIII protein comprises, or consists of, SEQ ID NO: 130. According to some embodiments, nucleic acid sequence encoding a FVIII protein comprises a nucleic acid sequence at least about 85%, 90%, 95%, 96%, 97%, 98%, or 99% identical to SEQ ID NO: 131. According to some embodiments, the nucleic acid sequence encoding a FVIII protein comprises, or consists of, SEQ ID NO: 131. According to some embodiments, nucleic acid sequence encoding a FVIII protein comprises a nucleic acid sequence at least about 85%, 90%, 95%, 96%, 97%, 98%, or 99% identical to SEQ ID NO: 132. According to some embodiments, the nucleic acid sequence encoding a FVIII protein comprises, or consists of, SEQ ID NO: 132. According to some embodiments, nucleic acid sequence encoding a FVIII protein comprises a nucleic acid sequence at least about 85%, 90%, 95%, 96%, 97%, 98%, or 99% identical to SEQ ID NO: 133. According to some embodiments, the nucleic acid sequence encoding a FVIII protein comprises, or consists of, SEQ ID NO: 133. According to some embodiments, nucleic acid sequence encoding a FVIII protein comprises a nucleic acid sequence at least about 85%, 90%, 95%, 96%, 97%, 98%, or 99% identical to SEQ ID NO: 134. According to some embodiments, the nucleic acid sequence encoding a FVIII protein comprises, or consists of, SEQ ID NO: 134. According to some embodiments, nucleic acid sequence encoding a FVIII protein comprises a nucleic acid sequence at least about 85%, 90%, 95%, 96%, 97%, 98%, or 99% identical to SEQ ID NO: 135. According to some embodiments, the nucleic acid sequence encoding a FVIII protein comprises, or consists of, SEQ ID NO: 135. According to some embodiments, nucleic acid sequence encoding a FVIII protein comprises a nucleic acid sequence at least about 85%, 90%, 95%, 96%, 97%, 98%, or 99% identical to SEQ ID NO: 136. According to some embodiments, the nucleic acid sequence encoding a FVIII protein comprises, or consists of, SEQ ID NO: 136. According to some embodiments, nucleic acid sequence encoding a FVIII protein comprises a nucleic acid sequence at least about 85%, 90%, 95%, 96%, 97%, 98%, or 99% identical to SEQ ID NO: 137. According to some embodiments, the nucleic acid sequence encoding a FVIII protein comprises, or consists of, SEQ ID NO: 137. According to some embodiments, nucleic acid sequence encoding a FVIII protein comprises a nucleic acid sequence at least about 85%, 90%, 95%, 96%, 97%, 98%, or 99% identical to SEQ ID NO: 138. According to some embodiments, the nucleic acid sequence encoding a FVIII protein comprises, or consists of, SEQ ID NO: 138. According to some embodiments, nucleic acid sequence encoding a FVIII protein comprises a nucleic acid sequence at least about 85%, 90%, 95%, 96%, 97%, 98%, or 99% identical to SEQ ID NO: 139. According to some embodiments, the nucleic acid sequence encoding a FVIII protein comprises, or consists of, SEQ ID NO: 139. According to some embodiments, nucleic acid sequence encoding a FVIII protein comprises a nucleic acid sequence at least about 85%, 90%, 95%, 96%, 97%, 98%, or 99% identical to SEQ ID NO: 140. According to some embodiments, the nucleic acid sequence encoding a FVIII protein comprises, or consists of, SEQ ID NO: 140. According to some embodiments, nucleic acid sequence encoding a FVIII protein comprises a nucleic acid sequence at least about 85%, 90%, 95%, 96%, 97%, 98%, or 99% identical to SEQ ID NO: 141. According to some embodiments, the nucleic acid sequence encoding a FVIII protein comprises, or consists of, SEQ ID NO: 141. According to some embodiments, nucleic acid sequence encoding a FVIII protein comprises a nucleic acid sequence at least about 85%, 90%, 95%, 96%, 97%, 98%, or 99% identical to SEQ ID NO: 142. According to some embodiments, the nucleic acid sequence encoding a FVIII protein comprises, or consists of, SEQ ID NO: 142. According to some embodiments, nucleic acid sequence encoding a FVIII protein comprises a nucleic acid sequence at least about 85%, 90%, 95%, 96%, 97%, 98%, or 99% identical to SEQ ID NO: 143. According to some embodiments, the nucleic acid sequence encoding a FVIII protein comprises, or consists of, SEQ ID NO: 143. According to some embodiments, nucleic acid sequence encoding a FVIII protein comprises a nucleic acid sequence at least about 85%, 90%, 95%, 96%, 97%, 98%, or 99% identical to SEQ ID NO: 144. According to some embodiments, the nucleic acid sequence encoding a FVIII protein comprises, or consists of, SEQ ID NO: 144. According to some embodiments, nucleic acid sequence encoding a FVIII protein comprises a nucleic acid sequence at least about 85%, 90%, 95%, 96%, 97%, 98%, or 99% identical to SEQ ID NO: 145. According to some embodiments, the nucleic acid sequence encoding a FVIII protein comprises, or consists of, SEQ ID NO: 145. According to some embodiments, nucleic acid sequence encoding a FVIII protein comprises a nucleic acid sequence at least about 85%, 90%, 95%, 96%, 97%, 98%, or 99% identical to SEQ ID NO: 146. According to some embodiments, the nucleic acid sequence encoding a FVIII protein comprises, or consists of, SEQ ID NO: 146. According to some embodiments, nucleic acid sequence encoding a FVIII protein comprises a nucleic acid sequence at least about 85%, 90%, 95%, 96%, 97%, 98%, or 99% identical to SEQ ID NO: 147. According to some embodiments, the nucleic acid sequence encoding a FVIII protein comprises, or consists of, SEQ ID NO: 147. According to some embodiments, nucleic acid sequence encoding a FVIII protein comprises a nucleic acid sequence at least about 85%, 90%, 95%, 96%, 97%, 98%, or 99% identical to SEQ ID NO: 148. According to some embodiments, the nucleic acid sequence encoding a FVIII protein comprises, or consists of, SEQ ID NO: 148. According to some embodiments, nucleic acid sequence encoding a FVIII protein comprises a nucleic acid sequence at least about 85%, 90%, 95%, 96%, 97%, 98%, or 99% identical to SEQ ID NO: 149. According to some embodiments, the nucleic acid sequence encoding a FVIII protein comprises, or consists of, SEQ ID NO: 149. According to some embodiments, nucleic acid sequence encoding a FVIII protein comprises a nucleic acid sequence at least about 85%, 90%, 95%, 96%, 97%, 98%, or 99% identical to SEQ ID NO: 150. According to some embodiments, the nucleic acid sequence encoding a FVIII protein comprises, or consists of, SEQ ID NO: 150. According to some embodiments, nucleic acid sequence encoding a FVIII protein comprises a nucleic acid sequence at least about 85%, 90%, 95%, 96%, 97%, 98%, or 99% identical to SEQ ID NO: 151. According to some embodiments, the nucleic acid sequence encoding a FVIII protein comprises, or consists of, SEQ ID NO: 151. According to some embodiments, nucleic acid sequence encoding a FVIII protein comprises a nucleic acid sequence at least about 85%, 90%, 95%, 96%, 97%, 98%, or 99% identical to SEQ ID NO: 152. According to some embodiments, the nucleic acid sequence encoding a FVIII protein comprises, or consists of, SEQ ID NO: 152. According to some embodiments, nucleic acid sequence encoding a FVIII protein comprises a nucleic acid sequence at least about 85%, 90%, 95%, 96%, 97%, 98%, or 99% identical to SEQ ID NO: 153. According to some embodiments, the nucleic acid sequence encoding a FVIII protein comprises, or consists of, SEQ ID NO: 153. According to some embodiments, nucleic acid sequence encoding a FVIII protein comprises a nucleic acid sequence at least about 85%, 90%, 95%, 96%, 97%, 98%, or 99% identical to SEQ ID NO: 154. According to some embodiments, the nucleic acid sequence encoding a FVIII protein comprises, or consists of, SEQ ID NO: 154. According to some embodiments, nucleic acid sequence encoding a FVIII protein comprises a nucleic acid sequence at least about 85%, 90%, 95%, 96%, 97%, 98%, or 99% identical to SEQ ID NO: 155. According to some embodiments, the nucleic acid sequence encoding a FVIII protein comprises, or consists of, SEQ ID NO: 155. According to some embodiments, nucleic acid sequence encoding a FVIII protein comprises a nucleic acid sequence at least about 85%, 90%, 95%, 96%, 97%, 98%, or 99% identical to SEQ ID NO: 156. According to some embodiments, the nucleic acid sequence encoding a FVIII protein comprises, or consists of, SEQ ID NO: 156. According to some embodiments, nucleic acid sequence encoding a FVIII protein comprises a nucleic acid sequence at least about 85%, 90%, 95%, 96%, 97%, 98%, or 99% identical to SEQ ID NO: 157. According to some embodiments, the nucleic acid sequence encoding a FVIII protein comprises, or consists of, SEQ ID NO: 157. According to some embodiments, nucleic acid sequence encoding a FVIII protein comprises a nucleic acid sequence at least about 85%, 90%, 95%, 96%, 97%, 98%, or 99% identical to SEQ ID NO: 158. According to some embodiments, the nucleic acid sequence encoding a FVIII protein comprises, or consists of, SEQ ID NO: 158. According to some embodiments, nucleic acid sequence encoding a FVIII protein comprises a nucleic acid sequence at least about 85%, 90%, 95%, 96%, 97%, 98%, or 99% identical to SEQ ID NO: 159. According to some embodiments, the nucleic acid sequence encoding a FVIII protein comprises, or consists of, SEQ ID NO: 159. According to some embodiments, nucleic acid sequence encoding a FVIII protein comprises a nucleic acid sequence at least about 85%, 90%, 95%, 96%, 97%, 98%, or 99% identical to SEQ ID NO: 160. According to some embodiments, the nucleic acid sequence encoding a FVIII protein comprises, or consists of, SEQ ID NO: 160. According to some embodiments, nucleic acid sequence encoding a FVIII protein comprises a nucleic acid sequence at least about 85%, 90%, 95%, 96%, 97%, 98%, or 99% identical to SEQ ID NO: 161. According to some embodiments, the nucleic acid sequence encoding a FVIII protein comprises, or consists of, SEQ ID NO: 161. According to some embodiments, nucleic acid sequence encoding a FVIII protein comprises a nucleic acid sequence at least about 85%, 90%, 95%, 96%, 97%, 98%, or 99% identical to SEQ ID NO: 162. According to some embodiments, the nucleic acid sequence encoding a FVIII protein comprises, or consists of, SEQ ID NO: 162. According to some embodiments, nucleic acid sequence encoding a FVIII protein comprises a nucleic acid sequence at least about 85%, 90%, 95%, 96%, 97%, 98%, or 99% identical to SEQ ID NO: 163. According to some embodiments, the nucleic acid sequence encoding a FVIII protein comprises, or consists of, SEQ ID NO: 163. According to some embodiments, nucleic acid sequence encoding a FVIII protein comprises a nucleic acid sequence at least about 85%, 90%, 95%, 96%, 97%, 98%, or 99% identical to SEQ ID NO: 164. According to some embodiments, the nucleic acid sequence encoding a FVIII protein comprises, or consists of, SEQ ID NO: 164. According to some embodiments, nucleic acid sequence encoding a FVIII protein comprises a nucleic acid sequence at least about 85%, 90%, 95%, 96%, 97%, 98%, 99% identical to SEQ ID NO: 165. According to some embodiments, the nucleic acid sequence encoding a FVIII protein comprises, or consists of, SEQ ID NO: 165. According to some embodiments, nucleic acid sequence encoding a FVIII protein comprises a nucleic acid sequence at least about 85%, 90%, 95%, 96%, 97%, 98%, or 99% identical to SEQ ID NO: 166. According to some embodiments, the nucleic acid sequence encoding a FVIII protein comprises, or consists of, SEQ ID NO: 166. According to some embodiments, nucleic acid sequence encoding a FVIII protein comprises a nucleic acid sequence at least about 85%, 90%, 95%, 96%, 97%, 98%, or 99% identical to SEQ ID NO: 167. According to some embodiments, the nucleic acid sequence encoding a FVIII protein comprises, or consists of, SEQ ID NO: 167. According to some embodiments, nucleic acid sequence encoding a FVIII protein comprises a nucleic acid sequence at least about 85%, 90%, 95%, 96%, 97%, 98%, or 99% identical to SEQ ID NO: 168. According to some embodiments, the nucleic acid sequence encoding a FVIII protein comprises, or consists of, SEQ ID NO: 168. According to some embodiments, nucleic acid sequence encoding a FVIII protein comprises a nucleic acid sequence at least about 85%, 90%, 95%, 96%, 97%, 98%, or 99% identical to SEQ ID NO: 169. According to some embodiments, the nucleic acid sequence encoding a FVIII protein comprises, or consists of, SEQ ID NO: 169. According to some embodiments, nucleic acid sequence encoding a FVIII protein comprises a nucleic acid sequence at least about 85%, 90%, 95%, 96%, 97%, 98%, or 99% identical to SEQ ID NO: 170. According to some embodiments, the nucleic acid sequence encoding a FVIII protein comprises, or consists of, SEQ ID NO: 170. According to some embodiments, nucleic acid sequence encoding a FVIII protein comprises a nucleic acid sequence at least about 85%, 90%, 95%, 96%, 97%, 98%, or 99% identical to SEQ ID NO: 171. According to some embodiments, the nucleic acid sequence encoding a FVIII protein comprises, or consists of, SEQ ID NO: 171. According to some embodiments, nucleic acid sequence encoding a FVIII protein comprises a nucleic acid sequence at least about 85%, 90%, 95%, 96%, 97%, 98%, or 99% identical to SEQ ID NO: 172. According to some embodiments, the nucleic acid sequence encoding a FVIII protein comprises, or consists of, SEQ ID NO: 172. According to some embodiments, nucleic acid sequence encoding a FVIII protein comprises a nucleic acid sequence at least about 85%, 90%, 95%, 96%, 97%, 98%, or 99% identical to SEQ ID NO: 173. According to some embodiments, the nucleic acid sequence encoding a FVIII protein comprises, or consists of, SEQ ID NO: 173. According to some embodiments, nucleic acid sequence encoding a FVIII protein comprises a nucleic acid sequence at least about 85%, 90%, 95%, 96%, 97%, 98%, or 99% identical to SEQ ID NO: 174. According to some embodiments, the nucleic acid sequence encoding a FVIII protein comprises, or consists of, SEQ ID NO: 174. According to some embodiments, nucleic acid sequence encoding a FVIII protein comprises a nucleic acid sequence at least about 85%, 90%, 95%, 96%, 97%, 98%, or 99% identical to SEQ ID NO: 175. According to some embodiments, the nucleic acid sequence encoding a FVIII protein comprises, or consists of, SEQ ID NO: 175. According to some embodiments, nucleic acid sequence encoding a FVIII protein comprises a nucleic acid sequence at least about 85%, 90%, 95%, 96%, 97%, 98%, or 99% identical to SEQ ID NO: 176. According to some embodiments, the nucleic acid sequence encoding a FVIII protein comprises, or consists of, SEQ ID NO: 176. According to some embodiments, nucleic acid sequence encoding a FVIII protein comprises a nucleic acid sequence at least about 85%, 90%, 95%, 96%, 97%, 98%, or 99% identical to SEQ ID NO: 177. According to some embodiments, the nucleic acid sequence encoding a FVIII protein comprises, or consists of, SEQ ID NO: 177. According to some embodiments, nucleic acid sequence encoding a FVIII protein comprises a nucleic acid sequence at least about 85%, 90%, 95%, 96%, 97%, 98%, or 99% identical to SEQ ID NO: 178. According to some embodiments, the nucleic acid sequence encoding a FVIII protein comprises, or consists of, SEQ ID NO: 178. According to some embodiments, nucleic acid sequence encoding a FVIII protein comprises a nucleic acid sequence at least about 85%, 90%, 95%, 96%, 97%, 98%, or 99% identical to SEQ ID NO: 179. According to some embodiments, the nucleic acid sequence encoding a FVIII protein comprises, or consists of, SEQ ID NO: 179. According to some embodiments, nucleic acid sequence encoding a FVIII protein comprises a nucleic acid sequence at least about 85%, 90%, 95%, 96%, 97%, 98%, or 99% identical to SEQ ID NO: 180. According to some embodiments, the nucleic acid sequence encoding a FVIII protein comprises, or consists of, SEQ ID NO: 180. According to some embodiments, nucleic acid sequence encoding a FVIII protein comprises a nucleic acid sequence at least about 85%, 90%, 95%, 96%, 97%, 98%, or 99% identical to SEQ ID NO: 181. According to some embodiments, the nucleic acid sequence encoding a FVIII protein comprises, or consists of, SEQ ID NO: 181. According to some embodiments, nucleic acid sequence encoding a FVIII protein comprises a nucleic acid sequence at least about 85%, 90%, 95%, 96%, 97%, 98%, or 99% identical to SEQ ID NO: 182. According to some embodiments, the nucleic acid sequence encoding a FVIII protein comprises, or consists of, SEQ ID NO: 182. According to some embodiments, nucleic acid sequence encoding a FVIII protein comprises a nucleic acid sequence at least about 85%, 90%, 95%, 96%, 97%, 98%, or 99% identical to SEQ ID NO: 183. According to some embodiments, the nucleic acid sequence encoding a FVIII protein comprises, or consists of, SEQ ID NO: 183. According to some embodiments, nucleic acid sequence encoding a FVIII protein comprises a nucleic acid sequence at least about 85%, 90%, 95%, 96%, 97%, 98%, or 99% identical to SEQ ID NO: 556. According to some embodiments, nucleic acid sequence encoding a FVIII protein comprises a nucleic acid sequence at least about 95% identical to SEQ ID NO: 556. According to some embodiments, nucleic acid sequence encoding a FVIII protein comprises a nucleic acid sequence at least about 96% identical to SEQ ID NO: 556. According to some embodiments, nucleic acid sequence encoding a FVIII protein comprises a nucleic acid sequence at least about 97% identical to SEQ ID NO: 556. According to some embodiments, nucleic acid sequence encoding a FVIII protein comprises a nucleic acid sequence at least about 98% identical to SEQ ID NO: 556. According to some embodiments, nucleic acid sequence encoding a FVIII protein comprises a nucleic acid sequence at least about 99% identical to SEQ ID NO: 556. According to some embodiments, the nucleic acid sequence encoding a FVIII protein comprises, or consists of, SEQ ID NO: 556.

[0209] According to some embodiments, nucleic acid sequence encoding a FVIII protein comprises a nucleic acid sequence at least about 85%, 90%, 95%, 96%, 97%, 98%, or 99% identical to SEQ ID NO: 626. According to some embodiments, nucleic acid sequence encoding a FVIII protein comprises a nucleic acid sequence at least about 95% identical to SEQ ID NO: 626. According to some embodiments, nucleic acid sequence encoding a FVIII protein comprises a nucleic acid sequence at least about 96% identical to SEQ ID NO: 626. According to some embodiments, nucleic acid sequence encoding a FVIII protein comprises a nucleic acid sequence at least about 97% identical to SEQ ID NO: 626. According to some embodiments, nucleic acid sequence encoding a FVIII protein comprises a nucleic acid sequence at least about 98% identical to SEQ ID NO: 626. According to some embodiments, nucleic acid sequence encoding a FVIII protein comprises a nucleic acid sequence at least about 99% identical to SEQ ID NO: 626. According to some embodiments, the nucleic acid sequence encoding a FVIII protein comprises, or consists of, SEQ ID NO: 626.

[0210] According to some embodiments, nucleic acid sequence encoding a FVIII protein comprises a nucleic acid sequence at least about 85%, 90%, 95%, 96%, 97%, 98%, or 99% identical to SEQ ID NO: 627. According to some embodiments, nucleic acid sequence encoding a FVIII protein comprises a nucleic acid sequence at least about 95% identical to SEQ ID NO: 627. According to some embodiments, nucleic acid sequence encoding a FVIII protein comprises a nucleic acid sequence at least about 96% identical to SEQ ID NO: 627. According to some embodiments, nucleic acid sequence encoding a FVIII protein comprises a nucleic acid sequence at least about 97% identical to SEQ ID NO: 627. According to some embodiments, nucleic acid sequence encoding a FVIII protein comprises a nucleic acid sequence at least about 98% identical to SEQ ID NO: 627. According to some embodiments, nucleic acid sequence encoding a FVIII protein comprises a nucleic acid sequence at least about 99% identical to SEQ ID NO: 627. According to some embodiments, the nucleic acid sequence encoding a FVIII protein comprises, or consists of, SEQ ID NO: 627.

[0211] According to some embodiments, nucleic acid sequence encoding a FVIII protein comprises a nucleic acid sequence at least about 85%, 90%, 95%, 96%, 97%, 98%, or 99% identical to SEQ ID NO: 628. According to some embodiments, nucleic acid sequence encoding a FVIII protein comprises a nucleic acid sequence at least about 95% identical to SEQ ID NO: 628. According to some embodiments, nucleic acid sequence encoding a FVIII protein comprises a nucleic acid sequence at least about 96% identical to SEQ ID NO: 628. According to some embodiments, nucleic acid sequence encoding a FVIII protein comprises a nucleic acid sequence at least about 97% identical to SEQ ID NO: 628. According to some embodiments, nucleic acid sequence encoding a FVIII protein comprises a nucleic acid sequence at least about 98% identical to SEQ ID NO: 628. According to some embodiments, nucleic acid sequence encoding a FVIII protein comprises a nucleic acid sequence at least about 99% identical to SEQ ID NO: 628. According to some embodiments, the nucleic acid sequence encoding a FVIII protein comprises, or consists of, SEQ ID NO: 628.

[0212] According to some embodiments, nucleic acid sequence encoding a FVIII protein comprises a nucleic acid sequence at least about 85%, 90%, 95%, 96%, 97%, 98%, or 99% identical to SEQ ID NO: 629. According to some embodiments, nucleic acid sequence encoding a FVIII protein comprises a nucleic acid sequence at least about 95% identical to SEQ ID NO: 629. According to some embodiments, nucleic acid sequence encoding a FVIII protein comprises a nucleic acid sequence at least about 96% identical to SEQ ID NO: 629. According to some embodiments, nucleic acid sequence encoding a FVIII protein comprises a nucleic acid sequence at least about 97% identical to SEQ ID NO: 629. According to some embodiments, nucleic acid sequence encoding a FVIII protein comprises a nucleic acid sequence at least about 98% identical to SEQ ID NO: 629. According to some embodiments, nucleic acid sequence encoding a FVIII protein comprises a nucleic acid sequence at least about 99% identical to SEQ ID NO: 629. According to some embodiments, the nucleic acid sequence encoding a FVIII protein comprises, or consists of, SEQ ID NO: 629.

[0213] According to some embodiments, nucleic acid sequence encoding a FVIII protein comprises a nucleic acid sequence at least about 85%, 90%, 95%, 96%, 97%, 98%, or 99% identical to SEQ ID NO: 630. According to some embodiments, nucleic acid sequence encoding a FVIII protein comprises a nucleic acid sequence at least about 95% identical to SEQ ID NO: 630. According to some embodiments, nucleic acid sequence encoding a FVIII protein comprises a nucleic acid sequence at least about 96% identical to SEQ ID NO: 630. According to some embodiments, nucleic acid sequence encoding a FVIII protein comprises a nucleic acid sequence at least about 97% identical to SEQ ID NO: 630. According to some embodiments, nucleic acid sequence encoding a FVIII protein comprises a nucleic acid sequence at least about 98% identical to SEQ ID NO: 630. According to some embodiments, nucleic acid sequence encoding a FVIII protein comprises a nucleic acid sequence at least about 99% identical to SEQ ID NO: 630. According to some embodiments, the nucleic acid sequence encoding a FVIII protein comprises, or consists of, SEQ ID NO: 630.

[0214] According to some embodiments, nucleic acid sequence encoding a FVIII protein comprises a nucleic acid sequence at least about 85%, 90%, 95%, 96%, 97%, 98%, or 99% identical to SEQ ID NO: 631. According to some embodiments, nucleic acid sequence encoding a FVIII protein comprises a nucleic acid sequence at least about 95% identical to SEQ ID NO: 631. According to some embodiments, nucleic acid sequence encoding a FVIII protein comprises a nucleic acid sequence at least about 96% identical to SEQ ID NO: 631. According to some embodiments, nucleic acid sequence encoding a FVIII protein comprises a nucleic acid sequence at least about 97% identical to SEQ ID NO: 631. According to some embodiments, nucleic acid sequence encoding a FVIII protein comprises a nucleic acid sequence at least about 98% identical to SEQ ID NO: 631. According to some embodiments, nucleic acid sequence encoding a FVIII protein comprises a nucleic acid sequence at least about 99% identical to SEQ ID NO: 631. According to some embodiments, the nucleic acid sequence encoding a FVIII protein comprises, or consists of, SEQ ID NO: 631.

[0215] According to some embodiments, nucleic acid sequence encoding a FVIII protein comprises a nucleic acid sequence at least about 85%, 90%, 95%, 96%, 97%, 98%, or 99% identical to SEQ ID NO: 632. According to some embodiments, nucleic acid sequence encoding a FVIII protein comprises a nucleic acid sequence at least about 95% identical to SEQ ID NO: 632. According to some embodiments, nucleic acid sequence encoding a FVIII protein comprises a nucleic acid sequence at least about 96% identical to SEQ ID NO: 632. According to some embodiments, nucleic acid sequence encoding a FVIII protein comprises a nucleic acid sequence at least about 97% identical to SEQ ID NO: 632. According to some embodiments, nucleic acid sequence encoding a FVIII protein comprises a nucleic acid sequence at least about 98% identical to SEQ ID NO: 632. According to some embodiments, nucleic acid sequence encoding a FVIII protein comprises a nucleic acid sequence at least about 99% identical to SEQ ID NO: 632. According to some embodiments, the nucleic acid sequence encoding a FVIII protein comprises, or consists of, SEQ ID NO: 632.

[0216] According to some embodiments, nucleic acid sequence encoding a FVIII protein comprises a nucleic acid sequence at least about 85%, 90%, 95%, 96%, 97%, 98%, or 99% identical to SEQ ID NO: 633. According to some embodiments, nucleic acid sequence encoding a FVIII protein comprises a nucleic acid sequence at least about 95% identical to SEQ ID NO: 633. According to some embodiments, nucleic acid sequence encoding a FVIII protein comprises a nucleic acid sequence at least about 96% identical to SEQ ID NO: 633. According to some embodiments, nucleic acid sequence encoding a FVIII protein comprises a nucleic acid sequence at least about 97% identical to SEQ ID NO: 633. According to some embodiments, nucleic acid sequence encoding a FVIII protein comprises a nucleic acid sequence at least about 98% identical to SEQ ID NO: 633. According to some embodiments, nucleic acid sequence encoding a FVIII protein comprises a nucleic acid sequence at least about 99% identical to SEQ ID NO: 633. According to some embodiments, the nucleic acid sequence encoding a FVIII protein comprises, or consists of, SEQ ID NO: 633.

[0217] According to some embodiments, the ceDNA construct is ceDNA933, and comprises at least one nucleic acid sequence between flanking inverted terminal repeats (ITRs), wherein the at least one nucleic acid sequence comprises SEQ ID NO: 71.

[0218] According to some embodiments, the ceDNA construct is ceDNA1265, and comprises at least one nucleic acid sequence between flanking inverted terminal repeats (ITRs), wherein the at least one nucleic acid sequence comprises SEQ ID NO: 72.

[0219] According to some embodiments, the ceDNA construct is ceDNA1270, and comprises at least one nucleic acid sequence between flanking ITRs, wherein the at least one nucleic acid sequence comprises SEQ ID NO: 73.

[0220] According to some embodiments, the ceDNA construct is ceDNA1368, and comprises at least one nucleic acid sequence between flanking ITRs, wherein the at least one nucleic acid sequence comprises SEQ ID NO: 74.

[0221] According to some embodiments, the ceDNA construct is ceDNA1367, and comprises at least one nucleic acid sequence between flanking ITRs, wherein the at least one nucleic acid sequence comprises SEQ ID NO: 75.

[0222] According to some embodiments, the ceDNA construct is ceDNA1374, and comprises at least one nucleic acid sequence between flanking ITRs, wherein the at least one nucleic acid sequence comprises SEQ ID NO: 76.

[0223] According to some embodiments, the ceDNA construct is ceDNA1373, and comprises at least one nucleic acid sequence between flanking ITRs, wherein the at least one nucleic acid sequence comprises SEQ ID NO: 77.

[0224] According to some embodiments, the ceDNA construct is ceDNA1918, and comprises at least one nucleic acid sequence between flanking ITRs, wherein the at least one nucleic acid sequence comprises SEQ ID NO: 78.

[0225] According to some embodiments, the ceDNA construct is ceDNA1919, and comprises at least one nucleic acid sequence between flanking ITRs, wherein the at least one nucleic acid sequence comprises SEQ ID NO: 79.

[0226] According to some embodiments, the ceDNA construct is ceDNA1920, and comprises at least one nucleic acid sequence between flanking ITRs, wherein the at least one nucleic acid sequence comprises SEQ ID NO: 80.

[0227] According to some embodiments, the ceDNA construct is ceDNA1921, and comprises at least one nucleic acid sequence between flanking ITRs, wherein the at least one nucleic acid sequence comprises SEQ ID NO: 81.

[0228] According to some embodiments, the ceDNA construct is ceDNA1922, and comprises at least one nucleic acid sequence between flanking ITRs, wherein the at least one nucleic acid sequence comprises SEQ ID NO: 82.

[0229] According to some embodiments, the ceDNA construct is ceDNA1923, and comprises at least one nucleic acid sequence between flanking ITRs, wherein the at least one nucleic acid sequence comprises SEQ ID NO: 83.

[0230] According to some embodiments, the ceDNA construct is ceDNA1927, and comprises at least one nucleic acid sequence between flanking ITRs, wherein the at least one nucleic acid sequence comprises SEQ ID NO: 84.

[0231] According to some embodiments, the ceDNA construct is ceDNA1928, and comprises at least one nucleic acid sequence between flanking ITRs, wherein the at least one nucleic acid sequence comprises SEQ ID NO: 85.

[0232] According to some embodiments, the ceDNA construct is ceDNA1929, and comprises at least one nucleic acid sequence between flanking ITRs, wherein the at least one nucleic acid sequence comprises SEQ ID NO: 86.

[0233] According to some embodiments, the ceDNA construct is ceDNA1930, and comprises at least one nucleic acid sequence between flanking ITRs, wherein the at least one nucleic acid sequence comprises SEQ ID NO: 87.

[0234] According to some embodiments, the ceDNA construct is ceDNA1931, and comprises at least one nucleic acid sequence between flanking ITRs, wherein the at least one nucleic acid sequence comprises SEQ ID NO: 88.

[0235] According to some embodiments, the ceDNA construct is ceDNA1932, and comprises at least one nucleic acid sequence between flanking ITRs, wherein the at least one nucleic acid sequence comprises SEQ ID NO: 89.

[0236] According to some embodiments, the ceDNA construct is ceDNA1933, and comprises at least one nucleic acid sequence between flanking ITRs, wherein the at least one nucleic acid sequence comprises SEQ ID NO: 90.

[0237] According to some embodiments, the ceDNA construct is ceDNA1651, and comprises at least one nucleic acid sequence between flanking ITRs, wherein the at least one nucleic acid sequence comprises SEQ ID NO: 556. According to some embodiments, the ceDNA construct is ceDNA1651, and comprises or essentially consists of SEQ ID NO:42.

[0238] In any of the above embodiments, the at least one nucleic acid sequence can be a heterologous nucleic acid sequence.

[0239] (iii) FVIII Therapeutic Proteins and Uses Thereof for the Treatment of Hemophilia A

[0240] The ceDNA vectors described herein can be used to deliver therapeutic FVIII proteins for treatment of hemophilia A associated with inappropriate expression of the FVIII protein and/or mutations within the FVIII protein.

[0241] ceDNA vectors as described herein can be used to express any desired FVIII therapeutic protein. Exemplary therapeutic FVIII therapeutic proteins include but are not limited to any FVIII protein, or portion thereof, expressed by the sequences (e.g., any one of SEQ ID NOs: 71-183, 556 and 626-633) as set forth in Table 1A and Table 1B herein.

[0242] In one embodiment, the expressed FVIII therapeutic protein is functional for the treatment of a hemophilia A. In some embodiments, FVIII therapeutic protein does not cause an immune system reaction.

[0243] In another embodiment, the ceDNA vectors encoding FVIII therapeutic protein or fragment thereof (e.g., functional fragment) can be used to generate a chimeric protein. Thus, it is specifically contemplated herein that a ceDNA vector expressing a chimeric protein can be administered to e.g., to any one or more tissues selected from: liver, kidneys, gallbladder, prostate, adrenal gland. In some embodiments, when a ceDNA vector that has been engineered to express FVIII is administered to an infant, or administered to a subject in utero, one can administer the ceDNA vector to any one or more tissues selected from: liver, adrenal gland, heart, intestine, lung, and stomach, or to a liver stem cell precursor thereof for the in vivo or ex vivo treatment of hemophilia A.

[0244] Hemophilia

[0245] Hemophilia A is a genetic deficiency in clotting factor VIII, which causes increased bleeding and usually affects males. In the majority of cases it is inherited as an X-linked recessive trait, though there are cases which arise from spontaneous mutations. In terms of the symptoms of hemophilia A, there are internal or external bleeding episodes. Individuals with more severe hemophilia suffer more severe and more frequent bleeding, while others with mild hemophilia typically suffer more minor symptoms except after surgery or serious trauma. Moderate hemophiliacs have variable symptoms which manifest along a spectrum between severe and mild forms.

[0246] Current treatments to prevent bleeding in people with hemophilia A involve Factor VIII medication. Most individuals with severe hemophilia require regular supplementation with intravenous recombinant or plasma concentrate Factor VIII. Recombinant blood clotting factor VIII is one of the most complex proteins for industrial manufacturing due to the low efficiency of its gene transcription, massive intracellular loss of its proprotein during post-translational processing, and the instability of the secreted protein. Mild hemophiliacs can manage their condition with desmopressin, a drug which releases stored factor VIII from blood vessel walls.

[0247] There are many complications related to treatment of hemophilia A. In children, an easily accessible intravenous port can be inserted to minimize frequent traumatic intravenous cannulation. However, these ports are associated with high infection rate and a risk of clots forming at the tip of the catheter, rendering it useless. Viral infections can be common in hemophiliacs due to frequent blood transfusions which put patients at risk of acquiring blood borne infections, such as HIV, hepatitis B and hepatitis C. Prion infections can also be transmitted by blood transfusions. Another therapeutic complication of hemophilia A is the development of inhibitor antibodies against factor VIII due to frequent infusions. These develop as the body recognizes the infused factor VIII as foreign, as the body does not produce its own copy. In these individuals, activated factor VII, a precursor to factor VIII in the coagulation cascade, can be infused as a treatment for hemorrhage in individuals with hemophilia and antibodies against replacement factor VIII.

[0248] Coagulation Cascade

[0249] Coagulation, also known as clotting, is the process by which blood changes from a liquid to a gel, forming a blood clot. It potentially results in hemostasis, the cessation of blood loss from a damaged vessel, followed by repair. The mechanism of coagulation involves activation, adhesion and aggregation of platelets along with deposition and maturation of fibrin. Disorders of coagulation are disease states which can result in bleeding (hemorrhage or bruising) or obstructive clotting (thrombosis).

[0250] Coagulation begins almost instantly after an injury to the blood vessel has damaged the endothelium lining the blood vessel. Exposure of blood to the subendothelial space initiates two processes: changes in platelets, and the exposure of subendothelial tissue factor to plasma Factor VII, which ultimately leads to fibrin formation. Platelets immediately form a plug at the site of injury; this is called primary hemostasis. Secondary hemostasis occurs simultaneously: additional coagulation factors or clotting factors beyond Factor VII (including Factor VIII) respond in a complex cascade to form fibrin strands, which strengthen the platelet plug.

[0251] The coagulation cascade of secondary hemostasis has two initial pathways which lead to fibrin formation. These are the contact activation pathway (also known as the intrinsic pathway), and the tissue factor pathway (also known as the extrinsic pathway), which both lead to the same fundamental reactions that produce fibrin. The primary pathway for the initiation of blood coagulation is the tissue factor (extrinsic) pathway. The pathways are a series of reactions, in which a zymogen (inactive enzyme precursor) of a serine protease and its glycoprotein co-factor are activated to become active components that then catalyze the next reaction in the cascade, ultimately resulting in cross-linked fibrin. Coagulation factors are generally indicated by Roman numerals, with a lowercase a appended to indicate an active form.

[0252] The coagulation factors are generally serine proteases (enzymes), which act by cleaving downstream proteins. The exceptions are tissue factor, FV, FVIII, FXIII. Tissue factor, FV and FVIII are glycoproteins, and Factor XIII is a transglutaminase. The coagulation factors circulate as inactive zymogens. The coagulation cascade is therefore classically divided into three pathways. The tissue factor and contact activation pathways both activate the “final common pathway” of factor X, thrombin and fibrin.

[0253] The main role of the tissue factor (extrinsic) pathway is to generate a “thrombin burst”, a process by which thrombin, the most important constituent of the coagulation cascade in terms of its feedback activation roles, is released very rapidly. FVIIa circulates in a higher amount than any other activated coagulation factor. The process includes the following steps:

[0254] Step 1: Following damage to the blood vessel, FVII leaves the circulation and comes into contact with tissue factor (TF) expressed on tissue-factor-bearing cells (stromal fibroblasts and leukocytes), forming an activated complex (TF-FVIIa).

[0255] Step 2: TF-FVIIa activates FIX and FX.

[0256] Step 3: FVII is itself activated by thrombin, FXIa, FXII and FXa.

[0257] Step 4: The activation of FX (to form FXa) by TF-FVIIa is almost immediately inhibited by tissue factor pathway inhibitor (TFPI).

[0258] Step 5: FXa and its co-factor FVa form the prothrombinase complex, which activates prothrombin to thrombin.

[0259] Step 6: Thrombin then activates other components of the coagulation cascade, including FV and FVIII (which forms a complex with FIX), and activates and releases FVIII from being bound to von Willebrand factor (vWF).

[0260] Step 7: FVIIIa is the co-factor of FIXa, and together they form the “tenase” complex, which activates FX; and so the cycle continues.

[0261] The contact activation (intrinsic) pathway begins with formation of the primary complex on collagen by high-molecular-weight kininogen (HMWK), prekallikrein, and FXII (Hageman factor). Prekallikrein is converted to kallikrein and FXII becomes FXIIa. FXIIa converts FXI into FXIa. Factor XIa activates FIX, which with its co-factor FVIIIa form the tenase complex, which activates FX to FXa. The minor role that the contact activation pathway has in initiating clot formation can be illustrated by the fact that patients with severe deficiencies of FXII, HMWK, and prekallikrein do not have a bleeding disorder. Instead, contact activation system is more involved in inflammation, and innate immunity.

[0262] The final common pathway shared by the intrinsic and extrinsic coagulation pathways involves the conversion of prothrombin into thrombin and fibrinogen into fibrin. Thrombin has a large array of functions, not only the conversion of fibrinogen to fibrin, the building block of a hemostatic plug. In addition, it is the most important platelet activator and on top of that it activates Factors VIII and V and their inhibitor protein C (in the presence of thrombomodulin), and it activates Factor XIII, which forms covalent bonds that crosslink the fibrin polymers that form from activated monomers.

[0263] Following activation by the contact factor or tissue factor pathways, the coagulation cascade is maintained in a prothrombotic state by the continued activation of FVIII and FIX to form the tenase complex, until it is down-regulated by the anticoagulant pathways.

[0264] In some embodiments, a ceDNA vector for expression of FVIII protein as disclosed herein can also encode co-factors or other polypeptides, sense or antisense oligonucleotides, or RNAs (coding or non-coding; e.g., siRNAs, shRNAs, micro-RNAs, and their antisense counterparts (e.g., antagoMiR)) that can be used in conjunction with the FVIII protein expressed from the ceDNA. Additionally, expression cassettes comprising sequence encoding an FVIII protein can also include an exogenous sequence that encodes a reporter protein to be used for experimental or diagnostic purposes, such as β-lactamase, β-galactosidase (LacZ), alkaline phosphatase, thymidine kinase, green fluorescent protein (GFP), chloramphenicol acetyltransferase (CAT), luciferase, and others well known in the art.

[0265] In one embodiment, the ceDNA vector comprises a nucleic acid sequence to express the FVIII protein that is functional for the treatment of hemophilia A. In a preferred embodiment, the therapeutic FVIII protein does not cause an immune system reaction, unless so desired.

### III. ceDNA Vector in General for Use in Production of FVIII Therapeutic Proteins

[0266] Embodiments of the disclosure are based on methods and compositions comprising close ended linear duplexed (ceDNA) vectors that can express the FVIII transgene. In some embodiments, the transgene is a sequence encoding an FVIII protein. According to some embodiments, the transgene is a nucleic acid sequence as set forth in Table 1A (e.g., any one of SEQ ID NOs: 71-183, 556 and 626-633). The ceDNA vectors for expression of FVIII protein as described herein are not limited by size, thereby permitting, for example, expression of all of the components necessary for expression of a transgene from a single vector. The ceDNA vector for expression of FVIII protein is preferably duplex, e.g., self-complementary, over at least a portion of the molecule, such as the expression cassette (e.g., ceDNA is not a double stranded circular molecule). The ceDNA vector has covalently closed ends, and thus is resistant to exonuclease digestion (e.g., exonuclease I or exonuclease III), e.g., for over an hour at 37° C.

[0267] In general, a ceDNA vector for expression of FVIII protein as disclosed herein, comprises in the 5′ to 3′ direction: a first adeno-associated virus (AAV) inverted terminal repeat (ITR)(wild-type or modified), a nucleic acid sequence of interest (for example an expression cassette as described herein) and a second AAV ITR (wild-type or modified). According to some embodiments, the ITR sequences are selected from any of: (i) at least one WT ITR and at least one modified AAV inverted terminal repeat (mod-ITR) (e.g., asymmetric modified ITRs); (ii) two modified ITRs where the mod-ITR pair have a different three-dimensional spatial organization with respect to each other (e.g., asymmetric modified ITRs), or (iii) symmetrical or substantially symmetrical WT-WT ITR pair, where each WT-ITR has the same three-dimensional spatial organization, or (iv) symmetrical or substantially symmetrical modified ITR pair, where each mod-ITR has the same three-dimensional spatial organization.

[0268] Encompassed herein are methods and compositions comprising the ceDNA vector for FVIII protein production, which may further include a delivery system, such as but not limited to, a liposome nanoparticle delivery system. Non-limiting exemplary liposome nanoparticle systems encompassed for use are disclosed herein. In some aspects, the disclosure provides for a lipid nanoparticle comprising ceDNA and an ionizable lipid. For example, a lipid nanoparticle formulation that is made and loaded with a ceDNA vector obtained by the process is disclosed in International Application PCT/US2018/050042, filed on Sep. 7, 2018, which is incorporated herein by reference in its entirety.

[0269] The ceDNA vectors for expression of FVIII protein as disclosed herein have no packaging constraints imposed by the limiting space within the viral capsid. ceDNA vectors represent a viable eukaryotically-produced alternative to prokaryote-produced plasmid DNA vectors, as opposed to encapsulated AAV genomes. This permits the insertion of control elements, e.g., regulatory switches as disclosed herein, large transgenes, multiple transgenes etc.

[0270] ceDNA vectors for expression of FVIII protein are capsid-free and can be obtained from a plasmid encoding in this order: a first ITR, an expression cassette comprising a transgene and a second ITR. The expression cassette may include one or more regulatory sequences that allows and/or controls the expression of the transgene, e.g., where the expression cassette can comprise one or more of, in this order: an enhancer/promoter set, an ORF (transgene, e.g., FVIII), a post-transcription regulatory element (e.g., WPRE 3′UTR), and a polyadenylation and termination signal (e.g., BGH polyA).

[0271] The expression cassette can also comprise an internal ribosome entry site (IRES) and/or a 2A element. The cis-regulatory elements include, but are not limited to, a promoter, a riboswitch, an insulator, a mir-regulatable element, a post-transcriptional regulatory element, a tissue- and cell type-specific promoter and an enhancer. In some embodiments the ITR can act as the promoter for the transgene, e.g., FVIII protein. In some embodiments, the ceDNA vector comprises additional components to regulate expression of the transgene, for example, a regulatory switch, which are described herein in the section entitled “Regulatory Switches” for controlling and regulating the expression of the FVIII protein, and can include if desired, a regulatory switch which is a kill switch to enable controlled cell death of a cell comprising a ceDNA vector.

[0272] The expression cassette can comprise more than 4000 nucleotides, 5000 nucleotides, 10,000 nucleotides or 20,000 nucleotides, or 30,000 nucleotides, or 40,000 nucleotides or 50,000 nucleotides, or any range between about 4000-10,000 nucleotides or 10,000-50,000 nucleotides, or more than 50,000 nucleotides. In some embodiments, the expression cassette can comprise a transgene in the range of 500 to 50,000 nucleotides in length. In some embodiments, the expression cassette can comprise a transgene in the range of 500 to 75,000 nucleotides in length. In some embodiments, the expression cassette can comprise a transgene which is in the range of 500 to 10,000 nucleotides in length. In some embodiments, the expression cassette can comprise a transgene which is in the range of 1000 to 10,000 nucleotides in length. In some embodiments, the expression cassette can comprise a transgene which is in the range of 500 to 5,000 nucleotides in length. The ceDNA vectors do not have the size limitations of encapsidated AAV vectors, thus enable delivery of a large-size expression cassette to provide efficient transgene expression. In some embodiments, the ceDNA vector is devoid of prokaryote-specific methylation.

[0273] ceDNA expression cassette can include, for example, an expressible exogenous sequence (e.g., open reading frame) or transgene that encodes a protein (e.g., FVIII) that is either absent, inactive, or insufficient activity in the recipient subject or a gene that encodes a protein having a desired biological or a therapeutic effect. The transgene can encode a gene product that can function to correct the expression of a defective gene or transcript. In principle, the expression cassette can include any gene that encodes a protein, polypeptide or RNA that is either reduced or absent due to a mutation or which conveys a therapeutic benefit when overexpressed is considered to be within the scope of the disclosure.

[0274] The expression cassette can comprise any transgene (e.g., encoding FVIII protein), for example, FVIII protein useful for treating hemophilia A in a subject, i.e., a therapeutic FVIII protein. A ceDNA vector can be used to deliver and express any FVIII protein of interest in the subject, alone or in combination with nucleic acids encoding polypeptides, or non-coding nucleic acids (e.g., RNAi, miRs etc.), as well as exogenous genes and nucleic acid sequences, including virus sequences in a subjects' genome, e.g., HIV virus sequences and the like. Preferably a ceDNA vector disclosed herein is used for therapeutic purposes (e.g., for medical, diagnostic, or veterinary uses) or immunogenic polypeptides. In certain embodiments, a ceDNA vector is useful to express any gene of interest in the subject, which includes one or more polypeptides, peptides, ribozymes, peptide nucleic acids, siRNAs, RNAis, antisense oligonucleotides, antisense polynucleotides, or RNAs (coding or non-coding; e.g., siRNAs, shRNAs, guide RNAs (gRNAs), micro-RNAs, and their antisense counterparts (e.g., antagoMiR)), antibodies, fusion proteins, or any combination thereof.

[0275] The expression cassette can also encode polypeptides, sense or antisense oligonucleotides, or RNAs (coding or non-coding; e.g., siRNAs, shRNAs, micro-RNAs, and their antisense counterparts (e.g., antagoMiR)). Expression cassettes can include an exogenous sequence that encodes a reporter protein to be used for experimental or diagnostic purposes, such as β-lactamase, β-galactosidase (LacZ), alkaline phosphatase, thymidine kinase, green fluorescent protein (GFP), chloramphenicol acetyltransferase (CAT), luciferase, and others well known in the art.

[0276] Sequences provided in the expression cassette, expression construct of a ceDNA vector for expression of FVIII protein described herein can be codon optimized for the target host cell. According to some embodiments, the sequence provided in the expression cassette is a sequence from Table 1A that is codon modified (e.g., a sequence selected from one or more of SEQ ID NOs: 71-183, 556 and 626-633). As used herein, the term “codon optimized” or “codon optimization” refers to the process of modifying a nucleic acid sequence for enhanced expression in the cells of the vertebrate of interest, e.g., mouse or human, by replacing at least one, more than one, or a significant number of codons of the native sequence (e.g., a prokaryotic sequence) with codons that are more frequently or most frequently used in the genes of that vertebrate. Various species exhibit particular bias for certain codons of a particular amino acid. Typically, codon optimization does not alter the amino acid sequence of the original translated protein. Optimized codons can be determined using e.g., Aptagen's GENEFORGE® codon optimization and custom gene synthesis platform (Aptagen, Inc., 2190 Fox Mill Rd. Suite 300, Herndon, Va. 20171) or another publicly available database. In some embodiments, the nucleic acid encoding the FVIII protein is optimized for human expression, and/or is a human FVIII, or functional fragment thereof, as known in the art.

[0277] A transgene expressed by the ceDNA vector for expression of FVIII protein as disclosed herein encodes FVIII protein. There are many structural features of ceDNA vectors for expression of FVIII protein that differ from plasmid-based expression vectors. ceDNA vectors may possess one or more of the following features: the lack of original (i.e. not inserted) bacterial DNA, the lack of a prokaryotic origin of replication, being self-containing, i.e., they do not require any sequences other than the two ITRs, including the Rep binding and terminal resolution sites (RBS and TRS), and an exogenous sequence between the ITRs, the presence of ITR sequences that form hairpins, and the absence of bacterial-type DNA methylation or indeed any other methylation considered abnormal by a mammalian host. In general, it is preferred for the present vectors not to contain any prokaryotic DNA but it is contemplated that some prokaryotic DNA may be inserted as an exogenous sequence, as a non-limiting example in a promoter or enhancer region. Another important feature distinguishing ceDNA vectors from plasmid expression vectors is that ceDNA vectors are single-strand linear DNA having closed ends, while plasmids are always double-strand DNA.

[0278] ceDNA vectors for expression of FVIII protein produced by the methods provided herein preferably have a linear and continuous structure rather than a non-continuous structure, as determined by restriction enzyme digestion assay (FIG. 3D). The linear and continuous structure is believed to be more stable from attack by cellular endonucleases, as well as less likely to be recombined and cause mutagenesis. Thus, a ceDNA vector in the linear and continuous structure is a preferred embodiment. The continuous, linear, single strand intramolecular duplex ceDNA vector can have covalently bound terminal ends, without sequences encoding AAV capsid proteins. These ceDNA vectors are structurally distinct from plasmids (including ceDNA plasmids described herein), which are circular duplex nucleic acid molecules of bacterial origin. The complimentary strands of plasmids may be separated following denaturation to produce two nucleic acid molecules, whereas in contrast, ceDNA vectors, while having complimentary strands, are a single DNA molecule and therefore even if denatured, remain a single molecule. In some embodiments, ceDNA vectors as described herein can be produced without DNA base methylation of prokaryotic type, unlike plasmids. Therefore, the ceDNA vectors and ceDNA-plasmids are different both in term of structure (in particular, linear versus circular) and also in view of the methods used for producing and purifying these different objects (see below), and also in view of their DNA methylation which is of prokaryotic type for ceDNA-plasmids and of eukaryotic type for the ceDNA vector.

[0279] There are several advantages of using a ceDNA vector for expression of FVIII protein as described herein over plasmid-based expression vectors, such advantages include, but are not limited to: 1) plasmids contain bacterial DNA sequences and are subjected to prokaryotic-specific methylation, e.g., 6-methyl adenosine and 5-methyl cytosine methylation, whereas capsid-free AAV vector sequences are of eukaryotic origin and do not undergo prokaryotic-specific methylation; as a result, capsid-free AAV vectors are less likely to induce inflammatory and immune responses compared to plasmids; 2) while plasmids require the presence of a resistance gene during the production process, ceDNA vectors do not; 3) while a circular plasmid is not delivered to the nucleus upon introduction into a cell and requires overloading to bypass degradation by cellular nucleases, ceDNA vectors contain viral cis-elements, i.e., ITRs, that confer resistance to nucleases and can be designed to be targeted and delivered to the nucleus. It is hypothesized that the minimal defining elements indispensable for ITR function are a Rep-binding site (RBS; 5′-GCGCGCTCGCTCGCTC-3′ (SEQ ID NO: 437) for AAV2) and a terminal resolution site (TRS; 5′-AGTTGG-3′ for AAV2) plus a variable palindromic sequence allowing for hairpin formation; and 4) ceDNA vectors do not have the over-representation of CpG dinucleotides often found in prokaryote-derived plasmids that reportedly binds a member of the Toll-like family of receptors, eliciting a T cell-mediated immune response. In contrast, transductions with capsid-free AAV vectors disclosed herein can efficiently target cell and tissue-types that are difficult to transduce with conventional AAV virions using various delivery reagent.

### IV. Inverted Terminal Repeats (ITRs)

[0280] As disclosed herein, ceDNA vectors for expression of FVIII protein contain a transgene or nucleic acid sequence, e.g., heterologous nucleic acid sequence, positioned between two inverted terminal repeat (ITR) sequences, where the ITR sequences can be an asymmetrical ITR pair or a symmetrical- or substantially symmetrical ITR pair, as these terms are defined herein. A ceDNA vector as disclosed herein can comprise ITR sequences that are selected from any of: (i) at least one WT ITR and at least one modified AAV inverted terminal repeat (mod-ITR) (e.g., asymmetric modified ITRs); (ii) two modified ITRs where the mod-ITR pair have a different three-dimensional spatial organization with respect to each other (e.g., asymmetric modified ITRs), or (iii) symmetrical or substantially symmetrical WT-WT ITR pair, where each WT-ITR has the same three-dimensional spatial organization, or (iv) symmetrical or substantially symmetrical modified ITR pair, where each mod-ITR has the same three-dimensional spatial organization, where the methods of the present disclosure may further include a delivery system, such as but not limited to a liposome nanoparticle delivery system.

[0281] In some embodiments, the ITR sequence can be from viruses of the Parvoviridae family, which includes two subfamilies: Parvovirinae, which infect vertebrates, and Densovirinae, which infect insects. The subfamily Parvovirinae (referred to as the parvoviruses) includes the genus Dependovirus, the members of which, under most conditions, require coinfection with a helper virus such as adenovirus or herpes virus for productive infection. The genus Dependovirus includes adeno-associated virus (AAV), which normally infects humans (e.g., serotypes 2, 3A, 3B, 5, and 6) or primates (e.g., serotypes 1 and 4), and related viruses that infect other warm-blooded animals (e.g., bovine, canine, equine, and ovine adeno-associated viruses). The parvoviruses and other members of the Parvoviridae family are generally described in Kenneth I. Berns, “Parvoviridae: The Viruses and Their Replication,” Chapter 69 in FIELDS VIROLOGY (3d Ed. 1996).

[0282] While ITRs exemplified in the specification and Examples herein are AAV2 WT-ITRs, one of ordinary skill in the art is aware that one can as stated above use ITRs from any known parvovirus, for example a dependovirus such as AAV (e.g., AAV1, AAV2, AAV3, AAV4, AAV5, AAV 5, AAV7, AAV8, AAV9, AAV10, AAV 11, AAV12, AAVrh8, AAVrh10, AAV-DJ, and AAV-DJ8 genome. E.g., NCBI: NC 002077; NC 001401; NC001729; NC001829; NC006152; NC 006260; NC 006261), chimeric ITRs, or ITRs from any synthetic AAV. In some embodiments, the AAV can infect warm-blooded animals, e.g., avian (AAAV), bovine (BAAV), canine, equine, and ovine adeno-associated viruses. In some embodiments the ITR is from B19 parvovirus (GenBank Accession No: NC 000883), Minute Virus from Mouse (MVM) (GenBank Accession No. NC 001510); goose parvovirus (GenBank Accession No. NC 001701); snake parvovirus 1 (GenBank Accession No. NC 006148). In some embodiments, the 5′ WT-ITR can be from one serotype and the 3′ WT-ITR from a different serotype, as discussed herein.

[0283] An ordinarily skilled artisan is aware that ITR sequences have a common structure of a double-stranded Holliday junction, which typically is a T-shaped or Y-shaped hairpin structure, where each WT-ITR is formed by two palindromic arms or loops (B-B′ and C-C′) embedded in a larger palindromic arm (A-A′), and a single stranded D sequence, (where the order of these palindromic sequences defines the flip or flop orientation of the ITR). See, for example, structural analysis and sequence comparison of ITRs from different AAV serotypes (AAV1-AAV6) and described in Grimm et al., J. Virology, 2006; 80(1); 426-439; Yan et al., J. Virology, 2005; 364-379; Duan et al., Virology 1999; 261; 8-14. One of ordinary skill in the art can readily determine WT-ITR sequences from any AAV serotype for use in a ceDNA vector or ceDNA-plasmid based on the exemplary AAV2 ITR sequences provided herein. See, for example, the sequence comparison of ITRs from different AAV serotypes (AAV1-AAV6, and avian AAV (AAAV) and bovine AAV (BAAV)) described in Grimm et al., J. Virology, 2006; 80(1); 426-439; that show the % identity of the left ITR of AAV2 to the left ITR from other serotypes: AAV-1 (84%), AAV-3 (86%), AAV-4 (79%), AAV-5 (58%), AAV-6 (left ITR) (100%) and AAV-6 (right ITR) (82%).

### A. Symmetrical ITR Pairs

[0284] In some embodiments, a ceDNA vector for expression of FVIII protein as described herein comprises, in the 5′ to 3′ direction: a first adeno-associated virus (AAV) inverted terminal repeat (ITR), a nucleic acid sequence of interest (for example an expression cassette as described herein) and a second AAV ITR, where the first ITR (5′ ITR) and the second ITR (3′ ITR) are symmetric, or substantially symmetrical with respect to each other—that is, a ceDNA vector can comprise ITR sequences that have a symmetrical three-dimensional spatial organization such that their structure is the same shape in geometrical space, or have the same A, C-C′ and B-B′ loops in 3D space. In such an embodiment, a symmetrical ITR pair, or substantially symmetrical ITR pair can be modified ITRs (e.g., mod-ITRs) that are not wild-type ITRs. A mod-ITR pair can have the same sequence which has one or more modifications from wild-type ITR and are reverse complements (inverted) of each other. In alternative embodiments, a modified ITR pair are substantially symmetrical as defined herein, that is, the modified ITR pair can have a different sequence but have corresponding or the same symmetrical three-dimensional shape.

[0285] (i) Wildtype ITRs

[0286] In some embodiments, the symmetrical ITRs, or substantially symmetrical ITRs are wild-type (WT-ITRs) as described herein. In some embodiments, both ITRs have a wild-type sequence, but do not necessarily have to be WT-ITRs from the same AAV serotype. In some embodiments, one WT-ITR can be from one AAV serotype, and the other WT-ITR can be from a different AAV serotype. In such an embodiment, a WT-ITR pair are substantially symmetrical as defined herein, e.g., they can have one or more conservative nucleotide modification while still retaining the symmetrical three-dimensional spatial organization.

[0287] Accordingly, as disclosed herein, ceDNA vectors contain a transgene or nucleic acid sequence, e.g., heterologous nucleic acid sequence, positioned between two flanking wild-type inverted terminal repeat (WT-ITR) sequences, that are either the reverse complement (inverted) of each other, or alternatively, are substantially symmetrical relative to each other, e.g., a WT-ITR pair having symmetrical three-dimensional spatial organization. In some embodiments, a wild-type ITR sequence (e.g., AAV WT-ITR) comprises a functional Rep binding site (RBS; e.g., 5′-GCGCGCTCGCTCGCTC-3′ for AAV2, SEQ ID NO: 437) and a functional terminal resolution site (TRS; e.g., 5′-AGTT-3′, SEQ ID NO: 438).

[0288] In one aspect, ceDNA vectors for expression of FVIII protein are obtainable from a vector polynucleotide that encodes a nucleic acid sequence, e.g., heterologous nucleic acid sequence, operatively positioned between two WT inverted terminal repeat sequences (WT-ITRs) (e.g., AAV WT-ITRs). In some embodiments, both ITRs have a wild-type sequence, but do not necessarily have to be WT-ITRs from the same AAV serotype. In some embodiments, one WT-ITR can be from one AAV serotype, and the other WT-ITR can be from a different AAV serotype. In such an embodiment, the WT-ITR pair are substantially symmetrical as defined herein, that is, they can have one or more conservative nucleotide modification while still retaining the symmetrical three-dimensional spatial organization. In some embodiments, the 5′ WT-ITR is from one AAV serotype, and the 3′ WT-ITR is from the same or a different AAV serotype. In some embodiments, the 5′ WT-ITR and the 3′WT-ITR are mirror images of each other, that is they are symmetrical. In some embodiments, the 5′ WT-ITR and the 3′ WT-ITR are from the same AAV serotype.

[0289] WT ITRs are well known. In one embodiment the two ITRs are from the same AAV2 serotype. In certain embodiments one can use WT from other serotypes. There are a number of serotypes that are homologous, e.g., AAV2, AAV4, AAV6, AAV8. In one embodiment, closely homologous ITRs (e.g., ITRs with a similar loop structure) can be used. In another embodiment, one can use AAV WT ITRs that are more diverse, e.g., AAV2 and AAV5, and still another embodiment, one can use an ITR that is substantially WT—that is, it has the basic loop structure of the WT but some conservative nucleotide changes that do not alter or affect the properties. When using WT-ITRs from the same viral serotype, one or more regulatory sequences may further be used. In certain embodiments, the regulatory sequence is a regulatory switch that permits modulation of the activity of the ceDNA, e.g., the expression of the encoded FVIII protein.

[0290] In some embodiments, one aspect of the technology described herein relates to a ceDNA vector for expression of FVIII protein, wherein the ceDNA vector comprises at least one nucleic acid sequence, e.g., heterologous nucleic acid sequence, encoding the FVIII protein, operably positioned between two wild-type inverted terminal repeat sequences (WT-ITRs), wherein the WT-ITRs can be from the same serotype, different serotypes or substantially symmetrical with respect to each other (i.e., have the symmetrical three-dimensional spatial organization such that their structure is the same shape in geometrical space, or have the same A, C-C′ and B-B′ loops in 3D space). In some embodiments, the symmetric WT-ITRs comprises a functional terminal resolution site and a Rep binding site. In some embodiments, the nucleic acid sequence, e.g., heterologous nucleic acid sequence, encodes a transgene, and the vector is not in a viral capsid.

[0291] In some embodiments, the WT-ITRs are the same but the reverse complement of each other. For example, the sequence AACG in the 5′ ITR may be CGTT (i.e., the reverse complement) in the 3′ ITR at the corresponding site. In one example, the 5′ WT-ITR sense strand comprises the sequence of ATCGATCG and the corresponding 3′ WT-ITR sense strand comprises CGATCGAT (i.e., the reverse complement of ATCGATCG). In some embodiments, the WT-ITRs ceDNA further comprises a terminal resolution site and a replication protein binding site (RPS) (sometimes referred to as a replicative protein binding site), e.g., a Rep binding site.

[0292] Exemplary WT-ITR sequences for use in the ceDNA vectors for expression of FVIII protein comprising WT-ITRs are shown in Table 2 herein, which shows pairs of WT-ITRs (5′ WT-ITR and the 3′ WT-ITR).

[0293] As an exemplary example, the present disclosure provides a ceDNA vector for expression of FVIII protein comprising a promoter operably linked to a transgene (e.g., heterologous nucleic acid sequence), with or without the regulatory switch, where the ceDNA is devoid of capsid proteins and is: (a) produced from a ceDNA-plasmid that encodes WT-ITRs, where each WT-ITR has the same number of intramolecularly duplexed base pairs in its hairpin secondary configuration (preferably excluding deletion of any AAA or TTT terminal loop in this configuration compared to these reference sequences), and (b) is identified as ceDNA using the assay for the identification of ceDNA by agarose gel electrophoresis under native gel and denaturing conditions in Example 1.

[0294] In some embodiments, the flanking WT-ITRs are substantially symmetrical to each other. In this embodiment the 5′ WT-ITR can be from one serotype of AAV, and the 3′ WT-ITR from a different serotype of AAV, such that the WT-ITRs are not identical reverse complements. For example, the 5′ WT-ITR can be from AAV2, and the 3′ WT-ITR from a different serotype (e.g., AAV1, 3, 4, 5, 6, 7, 8, 9, 10, 11, and 12. In some embodiments, WT-ITRs can be selected from two different parvoviruses selected from any to of: AAV1, AAV2, AAV3, AAV4, AAV5, AAV6, AAV7, AAV8, AAV9, AAV10, AAV11, AAV12, AAV13, snake parvovirus (e.g., royal python parvovirus), bovine parvovirus, goat parvovirus, avian parvovirus, canine parvovirus, equine parvovirus, shrimp parvovirus, porcine parvovirus, or insect AAV. In some embodiments, such a combination of WT ITRs is the combination of WT-ITRs from AAV2 and AAV6. In one embodiment, the substantially symmetrical WT-ITRs are when one is inverted relative to the other ITR at least 90% identical, at least 95% identical, at least 96% identical, at least 97% identical, at least 98% identical, at least 99% identical, or at least 99.5% identical and all points in between, and has the same symmetrical three-dimensional spatial organization. In some embodiments, a WT-ITR pair are substantially symmetrical as they have symmetrical three-dimensional spatial organization, e.g., have the same 3D organization of the A, C-C′, B-B′ and D arms. In one embodiment, a substantially symmetrical WT-ITR pair are inverted relative to the other, and are at least 95% identical, at least 96% identical, at least 97% identical, at least 98% identical, at least 99% identical, or at least 99.5% identical and all points in between, to each other, and one WT-ITR retains the Rep-binding site (RBS) of 5′-GCGCGCTCGCTCGCTC-3′ (SEQ ID NO: 437) and a terminal resolution site (TRS). In some embodiments, a substantially symmetrical WT-ITR pair are inverted relative to each other, and are at least 95% identical, at least 96% identical, at least 97% identical, at least 98% identical, at least 99% identical, or at least 99.5% identical and all points in between, to each other, and one WT-ITR retains the Rep-binding site (RBS) of 5′-GCGCGCTCGCTCGCTC-3′ (SEQ ID NO: 437) and a terminal resolution site (TRS) and in addition to a variable palindromic sequence allowing for hairpin secondary structure formation. Homology can be determined by standard means well known in the art such as BLAST (Basic Local Alignment Search Tool), BLASTN at default setting.

[0295] In some embodiments, the structural element of the ITR can be any structural element that is involved in the functional interaction of the ITR with a large Rep protein (e.g., Rep 78 or Rep 68). In certain embodiments, the structural element provides selectivity to the interaction of an ITR with a large Rep protein, i.e., determines at least in part which Rep protein functionally interacts with the ITR. In other embodiments, the structural element physically interacts with a large Rep protein when the Rep protein is bound to the ITR. Each structural element can be, e.g., a secondary structure of the ITR, a nucleic acid sequence of the ITR, a spacing between two or more elements, or a combination of any of the above. In one embodiment, the structural elements are selected from the group consisting of an A and an A′ arm, a B and a B′ arm, a C and a C′ arm, a D arm, a Rep binding site (RBE) and an RBE′ (i.e., complementary RBE sequence), and a terminal resolution sire (TRS).

[0296] By way of example only, Table 6 of International Publication No. WO/2019/161059 (incorporated by reference in its entirety herein), indicates exemplary combinations of WT-ITRs.

[0297] By way of example only, Table 2 sets forth the corresponding SEQ ID NOs: of the sequences of exemplary WT-ITRs from some different AAV serotypes.

TABLE 2

| AAV | | |
|---|---|---|
| serotype | 5′ WT-ITR (LEFT) | 3′ WT-ITR (RIGHT) |
| AAV1 | SEQ ID NO: 493 | SEQ ID NO: 494 |
| AAV2 | SEQ ID NO: 495 | SEQ ID NO: 496 |
| AAV3 | SEQ ID NO: 497 | SEQ ID NO: 498 |
| AAV4 | SEQ ID NO: 499 | SEQ ID NO: 500 |
| AAV5 | SEQ ID NO: 501 | SEQ ID NO: 502 |
| AAV6 | SEQ ID NO: 503 | SEQ ID NO: 504 |

[0298] In some embodiments, the nucleic acid sequence of the WT-ITR sequence can be modified (e.g., by modifying 1, 2, 3, 4 or 5, or more nucleotides or any range therein), whereby the modification is a substitution for a complementary nucleotide, e.g., G for a C, and vice versa, and T for an A, and vice versa.

[0299] The ceDNA vector for expression of FVIII protein as described herein can include WT-ITR structures that retains an operable RBE, TRS and RBE′ portion. FIG. 1A and FIG. 1B, using wild-type ITRs for exemplary purposes, show one possible mechanism for the operation of a TRS site within a wild-type ITR structure portion of a ceDNA vector. In some embodiments, the ceDNA vector for expression of FVIII protein contains one or more functional WT-ITR polynucleotide sequences that comprise a Rep-binding site (RBS; 5′-GCGCGCTCGCTCGCTC-3′ (SEQ ID NO: 437) for AAV2) and a terminal resolution site (TRS; 5′-AGTT (SEQ ID NO: 438)). In some embodiments, at least one WT-ITR is functional. In alternative embodiments, where a ceDNA vector for expression of FVIII protein comprises two WT-ITRs that are substantially symmetrical to each other, at least one WT-ITR is functional and at least one WT-ITR is non-functional.

B. Modified ITRs (Mod-ITRs) in General for ceDNA Vectors Comprising Asymmetric ITR Pairs or Symmetric ITR Pairs

[0300] As discussed herein, a ceDNA vector for expression of FVIII protein can comprise a symmetrical ITR pair or an asymmetrical ITR pair. In both instances, one or both of the ITRs can be modified ITRs—the difference being that in the first instance (i.e., symmetric mod-ITRs), the mod-ITRs have the same three-dimensional spatial organization (i.e., have the same A-A′, C-C′ and B-B′ arm configurations), whereas in the second instance (i.e., asymmetric mod-ITRs), the mod-ITRs have a different three-dimensional spatial organization (i.e., have a different configuration of A-A′, C-C′ and B-B′ arms).

[0301] In some embodiments, a modified ITR is an ITRs that is modified by deletion, insertion, and/or substitution as compared to a wild-type ITR sequence (e.g., AAV ITR). In some embodiments, at least one of the ITRs in the ceDNA vector comprises a functional Rep binding site (RBS; e.g., 5′-GCGCGCTCGCTCGCTC-3′ for AAV2, SEQ ID NO: 437) and a functional terminal resolution site (TRS; e.g., 5′-AGTT-3′, SEQ ID NO: 438.) In one embodiment, at least one of the ITRs is a non-functional ITR. In one embodiment, the different or modified ITRs are not each wild-type ITRs from different serotypes.

[0302] Specific alterations and mutations in the ITRs are described in detail herein, but in the context of ITRs, “altered” or “mutated” or “modified”, it indicates that nucleotides have been inserted, deleted, and/or substituted relative to the wild-type, reference, or original ITR sequence. The altered or mutated ITR can be an engineered ITR. As used herein, “engineered” refers to the aspect of having been manipulated by the hand of man. For example, a polypeptide is considered to be “engineered” when at least one aspect of the polypeptide, e.g., its sequence, has been manipulated by the hand of man to differ from the aspect as it exists in nature.

[0303] In some embodiments, a mod-ITR may be synthetic. In one embodiment, a synthetic ITR is based on ITR sequences from more than one AAV serotype. In another embodiment, a synthetic ITR includes no AAV-based sequence. In yet another embodiment, a synthetic ITR preserves the ITR structure described above although having only some or no AAV-sourced sequence. In some aspects, a synthetic ITR may interact preferentially with a wild-type Rep or a Rep of a specific serotype, or in some instances will not be recognized by a wild-type Rep and be recognized only by a mutated Rep.

[0304] The skilled artisan can determine the corresponding sequence in other serotypes by known means. For example, determining if the change is in the A, A′, B, B′, C, C′ or D region and determine the corresponding region in another serotype. One can use BLAST® (Basic Local Alignment Search Tool) or other homology alignment programs at default status to determine the corresponding sequence. The disclosure further provides populations and pluralities of ceDNA vectors comprising mod-ITRs from a combination of different AAV serotypes—that is, one mod-ITR can be from one AAV serotype and the other mod-ITR can be from a different serotype. Without wishing to be bound by theory, in one embodiment one ITR can be from or based on an AAV2 ITR sequence and the other ITR of the ceDNA vector can be from or be based on any one or more ITR sequence of AAV serotype 1 (AAV1), AAV serotype 4 (AAV4), AAV serotype 5 (AAV5), AAV serotype 6 (AAV6), AAV serotype 7 (AAV7), AAV serotype 8 (AAV8), AAV serotype 9 (AAV9), AAV serotype 10 (AAV10), AAV serotype 11 (AAV11), or AAV serotype 12 (AAV12).

[0305] Any parvovirus ITR can be used as an ITR or as a base ITR for modification. Preferably, the parvovirus is a dependovirus. More preferably AAV. The serotype chosen can be based upon the tissue tropism of the serotype. AAV2 has a broad tissue tropism, AAV1 preferentially targets to neuronal and skeletal muscle, and AAV5 preferentially targets neuronal, retinal pigmented epithelia, and photoreceptors. AAV6 preferentially targets skeletal muscle and lung. AAV8 preferentially targets liver, skeletal muscle, heart, and pancreatic tissues. AAV9 preferentially targets liver, skeletal and lung tissue. In one embodiment, the modified ITR is based on an AAV2 ITR.

[0306] More specifically, the ability of a structural element to functionally interact with a particular large Rep protein can be altered by modifying the structural element. For example, the nucleic acid sequence of the structural element can be modified as compared to the wild-type sequence of the ITR. In one embodiment, the structural element (e.g., A arm, A′ arm, B arm, B′ arm, C arm, C′ arm, D arm, RBE, RBE′, and TRS) of an ITR can be removed and replaced with a wild-type structural element from a different parvovirus. For example, the replacement structure can be from AAV1, AAV2, AAV3, AAV4, AAV5, AAV6, AAV7, AAV8, AAV9, AAV10, AAV11, AAV12, AAV13, snake parvovirus (e.g., royal python parvovirus), bovine parvovirus, goat parvovirus, avian parvovirus, canine parvovirus, equine parvovirus, shrimp parvovirus, porcine parvovirus, or insect AAV. For example, the ITR can be an AAV2 ITR and the A or A′ arm or RBE can be replaced with a structural element from AAV5. In another example, the ITR can be an AAV5 ITR and the C or C′ arms, the RBE, and the TRS can be replaced with a structural element from AAV2. In another example, the AAV ITR can be an AAV5 ITR with the B and B′ arms replaced with the AAV2 ITR B and B′ arms.

[0307] By way of example only, Table 3 indicates exemplary modifications of at least one nucleotide (e.g., a deletion, insertion and/or substitution) in regions of a modified ITR, where X is indicative of a modification of at least one nucleic acid (e.g., a deletion, insertion and/or substitution) in that section relative to the corresponding wild-type ITR. In some embodiments, any modification of at least one nucleotide (e.g., a deletion, insertion and/or substitution) in any of the regions of C and/or C′ and/or B and/or B′ retains three sequential T nucleotides (i.e., TTT) in at least one terminal loop. For example, if the modification results in any of: a single arm ITR (e.g., single C-C′ arm, or a single B-B′ arm), or a modified C-B′ arm or C′-B arm, or a two arm ITR with at least one truncated arm (e.g., a truncated C-C′ arm and/or truncated B-B′ arm), at least the single arm, or at least one of the arms of a two arm ITR (where one arm can be truncated) retains three sequential T nucleotides (i.e., TTT) in at least one terminal loop. In some embodiments, a truncated C-C′ arm and/or a truncated B-B′ arm has three sequential T nucleotides (i.e., TTT) in the terminal loop.

TABLE 3
Exemplary combinations of modifications
of at least one nucleotide (e.g., a
deletion, insertion and/or substitution) to
different B-B′ and C-C′ regions or
arms of ITRs (X indicates a nucleotide
modification, e.g., addition,
deletion or substitution of at least one
nucleotide in the region).

| B region | B′ region | C region | C′ region |
|---|---|---|---|
| X | | | |
| | X | | |
| X | X | | |
| | | X | |
| | | | X |
| | | X | X |
| X | | X | |
| X | | | X |
| | X | X | |
| | X | | X |
| X | X | X | |
| X | X | | X |
| X | | X | X |
| | X | X | X |
| X | X | X | X |

[0308] In some embodiments, mod-ITR for use in a ceDNA vector for expression of FVIII protein comprises an asymmetric ITR pair, or a symmetric mod-ITR pair as disclosed herein, can comprise any one of the combinations of modifications shown in Table 3, and also a modification of at least one nucleotide in any one or more of the regions selected from: between A′ and C, between C and C′, between C′ and B, between B and B′ and between B′ and A. In some embodiments, any modification of at least one nucleotide (e.g., a deletion, insertion and/or substitution) in the C or C′ or B or B′ regions, still preserves the terminal loop of the stem-loop. In some embodiments, any modification of at least one nucleotide (e.g., a deletion, insertion and/or substitution) between C and C′ and/or B and B′ retains three sequential T nucleotides (i.e., TTT) in at least one terminal loop. In alternative embodiments, any modification of at least one nucleotide (e.g., a deletion, insertion and/or substitution) between C and C′ and/or B and B′ retains three sequential A nucleotides (i.e., AAA) in at least one terminal loop. In some embodiments, a modified ITR for use herein can comprise any one of the combinations of modifications shown in Table 3, and also a modification of at least one nucleotide (e.g., a deletion, insertion and/or substitution) in any one or more of the regions selected from: A′, A and/or D. For example, in some embodiments, a modified ITR for use herein can comprise any one of the combinations of modifications shown in Table 3, and also a modification of at least one nucleotide (e.g., a deletion, insertion and/or substitution) in the A region. In some embodiments, a modified ITR for use herein can comprise any one of the combinations of modifications shown in Table 3, and also a modification of at least one nucleotide (e.g., a deletion, insertion and/or substitution) in the A′ region. In some embodiments, a modified ITR for use herein can comprise any one of the combinations of modifications shown in Table 3, and also a modification of at least one nucleotide (e.g., a deletion, insertion and/or substitution) in the A and/or A′ region. In some embodiments, a modified ITR for use herein can comprise any one of the combinations of modifications shown in Table 3, and also a modification of at least one nucleotide (e.g., a deletion, insertion and/or substitution) in the D region.

[0309] In one embodiment, the nucleic acid sequence of the structural element can be modified (e.g., by modifying 1, 2, 3, 4, 5, 6, 7, 8, 9, 10, 11, 12, 13, 14, 15, 16, 17, 18, 19, or 20 or more nucleotides or any range therein) to produce a modified structural element. In one embodiment, the specific modifications to the ITRs are exemplified herein (e.g., shown in FIG. 7A-7B of PCT/US2018/064242, filed on Dec. 6, 2018 and incorporated by reference in its entirety herein (e.g., SEQ ID NOs: 97-98, 101-103, 105-108, 111-112, 117-134, 545-54 in PCT/US2018/064242). In some embodiments, an ITR can be modified (e.g., by modifying 1, 2, 3, 4, 5, 6, 7, 8, 9, 10, 11, 12, 13, 14, 15, 16, 17, 18, 19, or 20 or more nucleotides or any range therein). In other embodiments, the ITR can have at least 80%, at least 85%, at least 90%, at least 95%, at least 96%, at least 97%, at least 98%, or at least 99%, or more sequence identity with one of the modified ITRs or the RBE-containing section of the A-A′ arm and C-C′ and B-B′ arms of SEQ ID NO: 3, 4, 15-47, 101-116 or 165-187, or shown in Tables 2-9 (i.e., SEQ ID NO: 110-112, 115-190, 200-468) of International application PCT/US18/49996, which is incorporated herein in its entirety by reference.

[0310] In some embodiments, a modified ITR can for example, comprise removal or deletion of all of a particular arm, e.g., all or part of the A-A′ arm, or all or part of the B-B′ arm or all or part of the C-C′ arm, or alternatively, the removal of 1, 2, 3, 4, 5, 6, 7, 8, 9 or more base pairs forming the stem of the loop so long as the final loop capping the stem (e.g., single arm) is still present (e.g., see ITR-21 in FIG. 7A of PCT/US2018/064242, filed Dec. 6, 2018, incorporated by reference in its entirety herein). In some embodiments, a modified ITR can comprise the removal of 1, 2, 3, 4, 5, 6, 7, 8, 9 or more base pairs from the B-B′ arm. In some embodiments, a modified ITR can comprise the removal of 1, 2, 3, 4, 5, 6, 7, 8, 9 or more base pairs from the C-C′ arm (see, e.g., ITR-1 in FIG. 3B, or ITR-45 in FIG. 7A of PCT/US2018/064242, filed Dec. 6, 2018, incorporated by reference in its entirety herein). In some embodiments, a modified ITR can comprise the removal of 1, 2, 3, 4, 5, 6, 7, 8, 9 or more base pairs from the C-C′ arm and the removal of 1, 2, 3, 4, 5, 6, 7, 8, 9 or more base pairs from the B-B′ arm. Any combination of removal of base pairs is envisioned, for example, 6 base pairs can be removed in the C-C′ arm and 2 base pairs in the B-B′ arm. As an illustrative example, FIG. 2B shows an exemplary modified ITR with at least 7 base pairs deleted from each of the C portion and the C′ portion, a substitution of a nucleotide in the loop between C and C′ region, and at least one base pair deletion from each of the B region and B′ regions such that the modified ITR comprises two arms where at least one arm (e.g., C-C′) is truncated. In some embodiments, the modified ITR also comprises at least one base pair deletion from each of the B region and B′ regions, such that the B-B′ arm is also truncated relative to WT ITR.

[0311] In some embodiments, a modified ITR can have between 1 and 50 (e.g., 1, 2, 3, 4, 5, 6, 7, 8, 9, 10, 11, 12, 13, 14, 15, 16, 17, 18, 19, 20, 21, 22, 23, 24, 25, 26, 27, 28, 29, 30, 31, 32, 33, 34, 35, 36, 37, 38, 39, 40, 41, 42, 43, 44, 45, 46, 47, 48, 49, or 50) nucleotide deletions relative to a full-length wild-type ITR sequence. In some embodiments, a modified ITR can have between 1 and 30 nucleotide deletions relative to a full-length WT ITR sequence. In some embodiments, a modified ITR has between 2 and 20 nucleotide deletions relative to a full-length wild-type ITR sequence.

[0312] In some embodiments, a modified ITR does not contain any nucleotide deletions in the RBE-containing portion of the A or A′ regions, so as not to interfere with DNA replication (e.g., binding to an RBE by Rep protein, or nicking at a terminal resolution site). In some embodiments, a modified ITR encompassed for use herein has one or more deletions in the B, B′, C, and/or C region as described herein.

[0313] In another embodiment, the structure of the structural element can be modified. For example, the structural element a change in the height of the stem and/or the number of nucleotides in the loop. For example, the height of the stem can be about 2, 3, 4, 5, 6, 7, 8, or 9 nucleotides or more or any range therein. In one embodiment, the stem height can be about 5 nucleotides to about 9 nucleotides and functionally interacts with Rep. In another embodiment, the stem height can be about 7 nucleotides and functionally interacts with Rep. In another example, the loop can have 3, 4, 5, 6, 7, 8, 9, or 10 nucleotides or more or any range therein.

[0314] In another embodiment, the number of GAGY binding sites or GAGY-related binding sites within the RBE or extended RBE can be increased or decreased. In one example, the RBE or extended RBE, can comprise 1, 2, 3, 4, 5, or 6 or more GAGY binding sites or any range therein. Each GAGY binding site can independently be an exact GAGY sequence or a sequence similar to GAGY as long as the sequence is sufficient to bind a Rep protein.

[0315] In another embodiment, the spacing between two elements (such as but not limited to the RBE and a hairpin) can be altered (e.g., increased or decreased) to alter functional interaction with a large Rep protein. For example, the spacing can be about 1, 2, 3, 4, 5, 6, 7, 8, 9, 10, 11, 12, 13, 14, 15, 16, 17, 18, 19, 20, or 21 nucleotides or more or any range therein.

[0316] The ceDNA vector for expression of FVIII protein as described herein can include an ITR structure that is modified with respect to the wild-type AAV2 ITR structure disclosed herein, but still retains an operable RBE, TRS and RBE′ portion. FIG. 1A and FIG. 1B show one possible mechanism for the operation of a TRS site within a wild-type ITR structure portion of a ceDNA vector for expression of FVIII protein. In some embodiments, the ceDNA vector for expression of FVIII protein contains one or more functional ITR polynucleotide sequences that comprise a Rep-binding site (RBS; 5′-GCGCGCTCGCTCGCTC-3′ (SEQ ID NO: 437) for AAV2) and a terminal resolution site (TRS; 5′-AGTT (SEQ ID NO: 438)). In some embodiments, at least one ITR (wt or modified ITR) is functional. In alternative embodiments, where a ceDNA vector for expression of FVIII protein comprises two modified ITRs that are different or asymmetrical to each other, at least one modified ITR is functional and at least one modified ITR is non-functional.

[0317] In some embodiments, the modified ITR (e.g., the left or right ITR) of a ceDNA vector for expression of FVIII protein as described herein has modifications within the loop arm, the truncated arm, or the spacer. Exemplary sequences of ITRs having modifications within the loop arm, the truncated arm, or the spacer are listed in Table 2 (i.e., SEQ ID NOS: 135-190, 200-233); Table 3 (e.g., SEQ ID Nos: 234-263); Table 4 (e.g., SEQ ID NOs: 264-293); Table 5 (e.g., SEQ ID Nos: 294-318 herein); Table 6 (e.g., SEQ ID NO: 319-468; and Tables 7-9 (e.g., SEQ ID Nos: 101-110, 111-112, 115-134) or Table 10A or 10B (e.g., SEQ ID Nos: 9, 100, 469-483, 484-499) of International application PCT/US18/49996, which is incorporated herein in its entirety by reference.

[0318] In some embodiments, the modified ITR for use in a ceDNA vector for expression of FVIII protein comprising an asymmetric ITR pair, or symmetric mod-ITR pair is selected from any or a combination of those shown in Tables 2, 3, 4, 5, 6, 7, 8, 9 and 10A-10B of International application PCT/US18/49996 which is incorporated herein in its entirety by reference.

[0319] Additional exemplary modified ITRs for use in a ceDNA vector for expression of FVIII protein comprising an asymmetric ITR pair, or symmetric mod-ITR pair in each of the above classes are provided in Tables 4A and 4B. The predicted secondary structure of the Right modified ITRs in Table 4A are shown in FIG. 7A of International Application PCT/US2018/064242, filed Dec. 6, 2018, and the predicted secondary structure of the Left modified ITRs in Table 4B are shown in FIG. 7B of International Application PCT/US2018/064242, filed Dec. 6, 2018, each of which is incorporated herein in its entirety by reference.

[0320] Table 4A and Table 4B show exemplary right and left modified ITRs.

TABLE 4A
Exemplary modified right ITRs. These exemplary
modified right ITRs can further comprise the
RBE of GCGCGCTCGCTCGCTC-3′ (SEQ ID NO: 437),
spacer of ACTGAGGC (SEQ ID NO: 439), the
spacer complement GCCTCAGT (SEQ ID NO: 440)
and RBE′ (i.e., complement to RBE)
of GAGCGAGCGAGCGCGC (SEQ ID NO: 441).

| ITR Construct | SEQ ID NO: |
|---|---|
| ITR-18 Right | 505 |
| ITR-19 Right | 506 |
| ITR-20 Right | 507 |
| ITR-21 Right | 508 |
| ITR-22 Right | 509 |
| ITR-23 Right | 510 |
| ITR-24 Right | 511 |
| ITR-25 Right | 512 |
| ITR-26 Right | 513 |
| ITR-27 Right | 514 |
| ITR-28 Right | 515 |
| ITR-29 Right | 516 |
| ITR-30 Right | 517 |
| ITR-31 Right | 518 |
| ITR-32 Right | 519 |
| ITR-49 Right | 520 |
| ITR-50 right | 521 |

TABLE 4B
Exemplary modified left ITRs. These exemplary
modified left ITRs can further comprise the
RBE of GCGCGCTCGCTCGCTC-3′ (SEQ ID NO: 437),
spacer of ACTGAGGC (SEQ ID NO: 439), the
spacer complement GCCTCAGT (SEQ ID NO: 440)
and RBE complement (RBE′) of
GAGCGAGCGAGCGCGC (SEQ ID NO: 441).

| ITR Construct | SEQ ID NO: |
|---|---|
| ITR-33 Left | 522 |
| ITR-34 Left | 523 |
| ITR-35 Left | 524 |
| ITR-36 Left | 525 |
| ITR-37 Left | 526 |
| ITR-38 Left | 527 |
| ITR-39 Left | 528 |
| ITR-40 Left | 529 |
| ITR-42 Left | 531 |
| ITR-43 Left | 532 |
| ITR-44 Left | 533 |
| ITR-45 Left | 534 |
| ITR-46 Left | 535 |
| ITR-47 Left | 536 |
| ITR-48 Left | 537 |
| ITR-41 Left | 530 |

[0321] In one embodiment, a ceDNA vector for expression of FVIII protein comprises, in the 5′ to 3′ direction: a first adeno-associated virus (AAV) inverted terminal repeat (ITR), a nucleic acid sequence of interest (for example an expression cassette as described herein) and a second AAV ITR, where the first ITR (5′ ITR) and the second ITR (3′ ITR) are asymmetric with respect to each other—that is, they have a different 3D-spatial configuration from one another. As an exemplary embodiment, the first ITR can be a wild-type ITR and the second ITR can be a mutated or modified ITR, or vice versa, where the first ITR can be a mutated or modified ITR and the second ITR a wild-type ITR. In some embodiment, the first ITR and the second ITR are both mod-ITRs, but have different sequences, or have different modifications, and thus are not the same modified ITRs, and have different 3D spatial configurations. Stated differently, a ceDNA vector with asymmetric ITRs comprises ITRs where any changes in one ITR relative to the WT-ITR are not reflected in the other ITR; or alternatively, where the asymmetric ITRs have a modified asymmetric ITR pair can have a different sequence and different three-dimensional shape with respect to each other. Exemplary asymmetric ITRs in the ceDNA vector for expression of FVIII protein and for use to generate a ceDNA-plasmid are shown in Table 4A and 4B.

[0322] In an alternative embodiment, a ceDNA vector for expression of FVIII protein comprises two symmetrical mod-ITRs—that is, both ITRs have the same sequence, but are reverse complements (inverted) of each other. In some embodiments, a symmetrical mod-ITR pair comprises at least one or any combination of a deletion, insertion, or substitution relative to wild-type ITR sequence from the same AAV serotype. The additions, deletions, or substitutions in the symmetrical ITR are the same but the reverse complement of each other. For example, an insertion of 3 nucleotides in the C region of the 5′ ITR would be reflected in the insertion of 3 reverse complement nucleotides in the corresponding section in the C′ region of the 3′ ITR. Solely for illustration purposes only, if the addition is AACG in the 5′ ITR, the addition is CGTT in the 3′ ITR at the corresponding site. For example, if the 5′ ITR sense strand is ATCGATCG with an addition of AACG between the G and A to result in the sequence ATCGAACGATCG (SEQ ID NO: 538). The corresponding 3′ ITR sense strand is CGATCGAT (the reverse complement of ATCGATCG) with an addition of CGTT (i.e. the reverse complement of AACG) between the T and C to result in the sequence CGATCGTTCGAT (SEQ ID NO: 539) (the reverse complement of ATCGAACGATCG) (SEQ ID NO: 538).

[0323] In alternative embodiments, the modified ITR pair are substantially symmetrical as defined herein—that is, the modified ITR pair can have a different sequence but have corresponding or the same symmetrical three-dimensional shape. For example, one modified ITR can be from one serotype and the other modified ITR be from a different serotype, but they have the same mutation (e.g., nucleotide insertion, deletion or substitution) in the same region. Stated differently, for illustrative purposes only, a 5′ mod-ITR can be from AAV2 and have a deletion in the C region, and the 3′ mod-ITR can be from AAV5 and have the corresponding deletion in the C′ region, and provided the 5′ mod-ITR and the 3′ mod-ITR have the same or symmetrical three-dimensional spatial organization, they are encompassed for use herein as a modified ITR pair.

[0324] In some embodiments, a substantially symmetrical mod-ITR pair has the same A, C-C′ and B-B′ loops in 3D space, e.g., if a modified ITR in a substantially symmetrical mod-ITR pair has a deletion of a C-C′ arm, then the cognate mod-ITR has the corresponding deletion of the C-C′ loop and also has a similar 3D structure of the remaining A and B-B′ loops in the same shape in geometric space of its cognate mod-ITR. By way of example only, substantially symmetrical ITRs can have a symmetrical spatial organization such that their structure is the same shape in geometrical space. This can occur, e.g., when a G-C pair is modified, for example, to a C-G pair or vice versa, or A-T pair is modified to a T-A pair, or vice versa. Therefore, using the exemplary example above of modified 5′ ITR as a ATCGAACGATCG (SEQ ID NO: 538), and modified 3′ ITR as CGATCGTTCGAT (SEQ ID NO: 539) (i.e., the reverse complement of ATCGAACGATCG (SEQ ID NO: 538)), these modified ITRs would still be symmetrical if, for example, the 5′ ITR had the sequence of ATCGAACCATCG (SEQ ID NO: 540), where G in the addition is modified to C, and the substantially symmetrical 3′ ITR has the sequence of CGATCGTTCGAT (SEQ ID NO: 539), without the corresponding modification of the T in the addition to a. In some embodiments, such a modified ITR pair are substantially symmetrical as the modified ITR pair has symmetrical stereochemistry.

[0325] Table 5 shows exemplary symmetric modified ITR pairs (i.e. a left modified ITRs and the symmetric right modified ITR) for use in a ceDNA vector for expression of FVIII protein. The bold (red) portion of the sequences identify partial ITR sequences (i.e., sequences of A-A′, C-C′ and B-B′ loops), also shown in FIGS. 31A-46B. These exemplary modified ITRs can comprise the RBE of GCGCGCTCGCTCGCTC-3′ (SEQ ID NO: 437), spacer of ACTGAGGC (SEQ ID NO: 439), the spacer complement GCCTCAGT (SEQ ID NO: 440) and RBE′ (i.e., complement to RBE) of GAGCGAGCGAGCGCGC (SEQ ID NO: 441).

TABLE 5
Exemplary symmetric modified ITR pairs (and corresponding
SEQ ID NOs) in a ceDNA vector for expression of FVIII protein

| | | Symmetric RIGHT | |
|---|---|---|---|
| LEFT modified ITR | | modified ITR | |
| (modified 5′ ITR) | | (modified 3′ ITR) | |
| ITR-33 left | SEQ ID NO: 522 | ITR-18, right | SEQ ID NO: 505 |
| ITR-34 left | SEQ ID NO: 523 | ITR-51, right | SEQ ID NO: 520 |
| ITR-35 left | SEQ ID NO: 524 | ITR-19, right | SEQ ID NO: 506 |
| ITR-36 left | SEQ ID NO: 525 | ITR-20, right | SEQ ID NO: 507 |
| ITR-37 left | SEQ ID NO: 526 | ITR-21, right | SEQ ID NO: 508 |
| ITR-38 left | SEQ ID NO: 527 | ITR-22 right | SEQ ID NO: 509 |
| ITR-39 left | SEQ ID NO: 528 | ITR-23, right | SEQ ID NO: 510 |
| ITR-40 left | SEQ ID NO: 529 | ITR-24, right | SEQ ID NO: 511 |
| ITR-41 left | SEQ ID NO: 530 | ITR-25 right | SEQ ID NO: 512 |
| ITR-42 left | SEQ ID NO: 531 | ITR-26 right | SEQ ID NO: 513 |
| ITR-43 left | SEQ ID NO: 532 | ITR-27 right | SEQ ID NO: 514 |
| ITR-44 left | SEQ ID NO: 533 | ITR-28 right | SEQ ID NO: 515 |
| ITR-45 left | SEQ ID NO: 534 | ITR-29, right | SEQ ID NO: 516 |
| ITR-46 left | SEQ ID NO: 535 | ITR-30, right | SEQ ID NO: 517 |
| ITR-47, left | SEQ ID NO: 536 | ITR-31, right | SEQ ID NO: 518 |
| ITR-48, left | SEQ ID NO: 537 | ITR-32 right | SEQ ID NO: 519 |

[0326] In some embodiments, a ceDNA vector for expression of FVIII protein comprising an asymmetric ITR pair can comprise an ITR with a modification corresponding to any of the modifications in ITR sequences or ITR partial sequences shown in any one or more of Tables 4A-4B herein, or the sequences shown in FIG. 7A-7B of International Application PCT/US2018/064242, filed Dec. 6, 2018, which is incorporated herein in its entirety, or disclosed in Tables 2, 3, 4, 5, 6, 7, 8, 9 or 10A-10B of International application PCT/US18/49996 filed Sep. 7, 2018 which is incorporated herein in its entirety by reference.

### V. Exemplary ceDNA Vectors

[0327] As described above, the present disclosure relates to recombinant ceDNA expression vectors and ceDNA vectors that encode FVIII protein, comprising any one of: an asymmetrical ITR pair, a symmetrical ITR pair, or substantially symmetrical ITR pair as described above. In certain embodiments, the disclosure relates to recombinant ceDNA vectors for expression of FVIII protein having flanking ITR sequences and a transgene, where the ITR sequences are asymmetrical, symmetrical or substantially symmetrical relative to each other as defined herein, and the ceDNA further comprises a nucleic acid sequence of interest (for example an expression cassette comprising the nucleic acid of a transgene) located between the flanking ITRs, wherein said nucleic acid molecule is devoid of viral capsid protein coding sequences.

[0328] The ceDNA expression vector for expression of FVIII protein may be any ceDNA vector that can be conveniently subjected to recombinant DNA procedures including nucleic acid sequence(s) as described herein, provided at least one ITR is altered. The ceDNA vectors for expression of FVIII protein of the present disclosure are compatible with the host cell into which the ceDNA vector is to be introduced. In certain embodiments, the ceDNA vectors may be linear. In certain embodiments, the ceDNA vectors may exist as an extrachromosomal entity. In certain embodiments, the ceDNA vectors of the present disclosure may contain an element(s) that permits integration of a donor sequence into the host cell's genome. As used herein “transgene” and “heterologous nucleic acid sequence” are synonymous, and may encode a FVIII protein, as described herein.

[0329] ceDNA vectors are capsid-free and can be obtained from a plasmid encoding in this order: a first ITR, an expressible transgene cassette and a second ITR, where the first and second ITR sequences are asymmetrical, symmetrical or substantially symmetrical relative to each other as defined herein. ceDNA vectors for expression of FVIII protein are capsid-free and can be obtained from a plasmid encoding in this order: a first ITR, an expressible transgene (protein or nucleic acid) and a second ITR, where the first and second ITR sequences are asymmetrical, symmetrical or substantially symmetrical relative to each other as defined herein. In some embodiments, the expressible transgene cassette includes, as needed: an enhancer/promoter, one or more homology arms, a donor sequence, a post-transcription regulatory element (e.g., WPRE, e.g., SEQ ID NO: 67)), and a polyadenylation and termination signal (e.g., BGH polyA, e.g., SEQ ID NO: 68).

### A. Regulatory Elements

[0330] The ceDNA vectors for expression of FVIII protein as described herein comprising an asymmetric ITR pair or symmetric ITR pair as defined herein, can further comprise a specific combination of cis-regulatory elements. The cis-regulatory elements include, but are not limited to, a promoter, a riboswitch, an insulator, a mir-regulatable element, a post-transcriptional regulatory element, a tissue- and cell type-specific promoter and an enhancer. In some embodiments, the ITR can act as the promoter for the transgene, e.g., FVIII protein. In some embodiments, the ceDNA vector for expression of FVIII protein as described herein comprises additional components to regulate expression of the transgene, for example, regulatory switches as described herein, to regulate the expression of the transgene, or a kill switch, which can kill a cell comprising the ceDNA vector encoding FVIII protein thereof. Regulatory elements, including Regulatory Switches that can be used in the present disclosure are more fully discussed in International application PCT/US18/49996, which is incorporated herein in its entirety by reference.

[0331] Described herein are ceDNA vectors that comprise a codon optimized FVII nucleic acid sequence and combined with particular cis-elements (e.g., promoters, enhancers, specific promoter and enhancer combinations). According to some embodiments, particular codon optimized FVIII nucleic acid sequences perform better when combined with one or more specific promoter sequence and/or a specific enhancer sequence, compared to the same codon optimized FVIII nucleic acid sequence combined with another promoter sequence and/or a specific enhancer sequence.

### (i) Promoters:

[0332] It will be appreciated by one of ordinary skill in the art that promoters used in the ceDNA vectors for expression of FVIII protein as disclosed herein are tailored as appropriate for the specific sequences they are promoting.

[0333] Expression cassettes of the ceDNA vector for expression of FVIII protein can contain tissue-specific eukaryotic promoters to limit transgene expression to specific cell types and reduce toxic effects and immune responses resulting from unregulated, ectopic expression. The promoter region used may further include one or more additional regulatory sequences (e.g., native), e.g., enhancers.

[0334] In some embodiments, a promoter may also be a promoter from a human gene. The promoter may also be a tissue specific promoter, such as a liver specific promoter, such as human alpha 1-antitrypsin (HAAT). According to some embodiments, the promoter may be synthetic.

[0335] Non-limiting examples of suitable promoters for use in accordance with the present disclosure include any of the promoters described herein, or any of the following:

[0336] According to some embodiments, the promoter is hAAT core, the human a1 antitrypsin (hAAT) promoter (Core promoter sequence from human A1AT gene). According to some embodiments, the hAAT promoter comprises the sequence set forth as SEQ ID NO: 210.

[0337] According to some embodiments, the promoter comprises a nucleic acid sequence at least about 85% identical to SEQ ID NO: 210. According to some embodiments, the promoter comprises a nucleic acid sequence at least about 90% identical to SEQ ID NO: 210. According to some embodiments, the promoter comprises a nucleic acid sequence at least about 95% identical to SEQ ID NO: 210. According to some embodiments, the promoter comprises a nucleic acid sequence at least about 96% identical to SEQ ID NO: 210. According to some embodiments, the promoter comprises a nucleic acid sequence at least about 97% identical to SEQ ID NO: 210. According to some embodiments, the promoter comprises a nucleic acid sequence at least about 98% identical to SEQ ID NO: 210. According to some embodiments, the promoter comprises a nucleic acid sequence at least about 99% identical to SEQ ID NO: 210. According to some embodiments, the promoter consists of the nucleic acid sequence of SEQ ID NO: 210.

[0338] According to some embodiments, the promoter is the minimal transthyretin promoter (TTRm). According to some embodiments, the TTRm promoter comprises the sequence set forth as SEQ ID NO: 211.

[0339] According to some embodiments, the promoter comprises a nucleic acid sequence at least about 85% identical to SEQ ID NO: 211. According to some embodiments, the promoter comprises a nucleic acid sequence at least about 90% identical to SEQ ID NO: 211. According to some embodiments, the promoter comprises a nucleic acid sequence at least about 95% identical to SEQ ID NO: 211. According to some embodiments, the promoter comprises a nucleic acid sequence at least about 96% identical to SEQ ID NO: 211. According to some embodiments, the promoter comprises a nucleic acid sequence at least about 97% identical to SEQ ID NO: 211. According to some embodiments, the promoter comprises a nucleic acid sequence at least about 98% identical to SEQ ID NO: 211. According to some embodiments, the promoter comprises a nucleic acid sequence at least about 99% identical to SEQ ID NO: 211. According to some embodiments, the promoter consists of the nucleic acid sequence of SEQ ID NO: 211.

[0340] According to some embodiments, the promoter is hAAT_core_C06, a CpG minimized version of the hAAT core promoter (A1AT gene promoter). According to some embodiments, the hAAT promoter comprises the sequence set forth as SEQ ID NO: 212.

[0341] According to some embodiments, the promoter comprises a nucleic acid sequence at least about 85% identical to SEQ ID NO: 212. According to some embodiments, the promoter comprises a nucleic acid sequence at least about 90% identical to SEQ ID NO: 212. According to some embodiments, the promoter comprises a nucleic acid sequence at least about 95% identical to SEQ ID NO: 212. According to some embodiments, the promoter comprises a nucleic acid sequence at least about 96% identical to SEQ ID NO: 212. According to some embodiments, the promoter comprises a nucleic acid sequence at least about 97% identical to SEQ ID NO: 212. According to some embodiments, the promoter comprises a nucleic acid sequence at least about 98% identical to SEQ ID NO: 212. According to some embodiments, the promoter comprises a nucleic acid sequence at least about 99% identical to SEQ ID NO: 212. According to some embodiments, the promoter consists of the nucleic acid sequence of SEQ ID NO: 212.

[0342] According to some embodiments, the promoter is hAAT_core_C07, a CpG minimized version of the hAAT core promoter (A1AT gene promoter). According to some embodiments, the hAAT promoter comprises the sequence set forth as SEQ ID NO: 213.

[0343] According to some embodiments, the promoter comprises a nucleic acid sequence at least about 85% identical to SEQ ID NO: 213. According to some embodiments, the promoter comprises a nucleic acid sequence at least about 90% identical to SEQ ID NO: 213. According to some embodiments, the promoter comprises a nucleic acid sequence at least about 95% identical to SEQ ID NO: 213. According to some embodiments, the promoter comprises a nucleic acid sequence at least about 96% identical to SEQ ID NO: 213. According to some embodiments, the promoter comprises a nucleic acid sequence at least about 97% identical to SEQ ID NO: 213. According to some embodiments, the promoter comprises a nucleic acid sequence at least about 98% identical to SEQ ID NO: 213. According to some embodiments, the promoter comprises a nucleic acid sequence at least about 99% identical to SEQ ID NO: 213. According to some embodiments, the promoter consists of the nucleic acid sequence of SEQ ID NO: 213.

[0344] According to some embodiments, the promoter is hAAT_core_C08, a CpG minimized version of the hAAT core promoter (A1AT gene promoter). According to some embodiments, the hAAT promoter comprises the sequence set forth as SEQ ID NO: 214.

[0345] According to some embodiments, the promoter comprises a nucleic acid sequence at least about 85% identical to SEQ ID NO: 214. According to some embodiments, the promoter comprises a nucleic acid sequence at least about 90% identical to SEQ ID NO: 214. According to some embodiments, the promoter comprises a nucleic acid sequence at least about 95% identical to SEQ ID NO: 214. According to some embodiments, the promoter comprises a nucleic acid sequence at least about 96% identical to SEQ ID NO: 214. According to some embodiments, the promoter comprises a nucleic acid sequence at least about 97% identical to SEQ ID NO: 214. According to some embodiments, the promoter comprises a nucleic acid sequence at least about 98% identical to SEQ ID NO: 214. According to some embodiments, the promoter comprises a nucleic acid sequence at least about 99% identical to SEQ ID NO: 214. According to some embodiments, the promoter consists of the nucleic acid sequence of SEQ ID NO: 214.

[0346] According to some embodiments, the promoter is hAAT_core_C09, a CpG minimized version of the hAAT core promoter (A1AT gene promoter). According to some embodiments, the hAAT promoter comprises the sequence set forth as SEQ ID NO: 215.

[0347] According to some embodiments, the promoter comprises a nucleic acid sequence at least about 85% identical to SEQ ID NO: 215. According to some embodiments, the promoter comprises a nucleic acid sequence at least about 90% identical to SEQ ID NO: 215. According to some embodiments, the promoter comprises a nucleic acid sequence at least about 95% identical to SEQ ID NO: 215. According to some embodiments, the promoter comprises a nucleic acid sequence at least about 96% identical to SEQ ID NO: 215. According to some embodiments, the promoter comprises a nucleic acid sequence at least about 97% identical to SEQ ID NO: 215. According to some embodiments, the promoter comprises a nucleic acid sequence at least about 98% identical to SEQ ID NO: 215. According to some embodiments, the promoter comprises a nucleic acid sequence at least about 99% identical to SEQ ID NO: 215. According to some embodiments, the promoter consists of the nucleic acid sequence of SEQ ID NO: 215.

[0348] According to some embodiments, the promoter is hAAT_core_C10, a CpG minimized version of the hAAT core promoter (A1AT gene promoter). According to some embodiments, the hAAT promoter comprises the sequence set forth as SEQ ID NO: 216.

[0349] According to some embodiments, the promoter comprises a nucleic acid sequence at least about 85% identical to SEQ ID NO: 216. According to some embodiments, the promoter comprises a nucleic acid sequence at least about 90% identical to SEQ ID NO: 216. According to some embodiments, the promoter comprises a nucleic acid sequence at least about 95% identical to SEQ ID NO: 216. According to some embodiments, the promoter comprises a nucleic acid sequence at least about 96% identical to SEQ ID NO: 216. According to some embodiments, the promoter comprises a nucleic acid sequence at least about 97% identical to SEQ ID NO: 216. According to some embodiments, the promoter comprises a nucleic acid sequence at least about 98% identical to SEQ ID NO: 216. According to some embodiments, the promoter comprises a nucleic acid sequence at least about 99% identical to SEQ ID NO: 216. According to some embodiments, the promoter consists of the nucleic acid sequence of SEQ ID NO: 216.

[0350] According to some embodiments, the promoter is hAAT_core_truncated, 5p truncated hAAT core promoter derived from hAAT_core (SEQ ID NO: 210). According to some embodiments, the hAAT promoter comprises the sequence set forth as SEQ ID NO: 217.

[0351] According to some embodiments, the promoter comprises a nucleic acid sequence at least about 85% identical to SEQ ID NO: 217. According to some embodiments, the promoter comprises a nucleic acid sequence at least about 90% identical to SEQ ID NO: 217. According to some embodiments, the promoter comprises a nucleic acid sequence at least about 95% identical to SEQ ID NO: 217. According to some embodiments, the promoter comprises a nucleic acid sequence at least about 96% identical to SEQ ID NO: 217. According to some embodiments, the promoter comprises a nucleic acid sequence at least about 97% identical to SEQ ID NO: 217. According to some embodiments, the promoter comprises a nucleic acid sequence at least about 98% identical to SEQ ID NO: 217. According to some embodiments, the promoter comprises a nucleic acid sequence at least about 99% identical to SEQ ID NO: 217. According to some embodiments, the promoter consists of the nucleic acid sequence of SEQ ID NO: 217.

[0352] Table 6 lists core promoter sequences, and their corresponding SEQ ID NOs, that can be implemented in ceDNA FVIII therapeutics described herein.

TABLE 6
Core Promoters

| | | | SEQ ID |
|---|---|---|---|
| | Name | Description | NO. |
| GE-015 | hAAT_core | Core promoter sequence from human A1AT gene | 210 |
| GE-1121 | TTRm | Core promoter sequence from mouse Transthyretin | 211 |
| | | gene | |
| GE-1133 | hAAT_core_C06 | CpG minimized version of the hAAT core | 212 |
| | | promoter (A1AT gene promoter) | |
| GE-1134 | hAAT_core_C07 | CpG minimized version of the hAAT core | 213 |
| | | promoter (A1AT gene promoter) | |
| GE-1135 | hAAT_core_C08 | CpG minimized version of the hAAT core | 214 |
| | | promoter (A1AT gene promoter) | |
| GE-1136 | hAAT_core_C09 | CpG minimized version of the hAAT core | 215 |
| | | promoter (A1AT gene promoter) | |
| GE-1137 | hAAT_core_C10 | CpG minimized version of the hAAT core | 216 |
| | | promoter (A1AT gene promoter) (also referred to | |
| | | as hAAT(979)) | |
| GE-1170 | hAAT_core_ | 5p truncated hAAT core promoter derived from | 217 |
| | truncated | GE-015 | |

[0353] According to particular embodiments, the promoter is selected from the group consisting of: the VandenDriessche (referred to as “VD” or “VanD”) promoter, human alpha 1-antitrypsin (hAAT) promoter (including the CpG minimized hAAT(979) promoter (CpGmin hAAT_core_C10) and other CpGmin_hAAT promoters like hAAT_core_C06; hAAT_core_C07; hAAT_core_C08; and hAAT_core_C09) and the transthyretin (TTR) liver specific promoter.

[0354] In some embodiments, the VD promoter comprises the minute virus mouse (MVM) intron, the minimal transthyretin promoter (TTRm), the serpin enhancer (72 bp) and TTRm 5′ UTR. According to some embodiments, the TTRm comprises SEQ ID NO: 211. According to some embodiments, the serpin enhancer comprises tSEQ ID NO: 19. According to some embodiments, the TTRm 5′UTR comprises SEQ ID NO: 426.

[0355] According to further embodiments, the VD promoter comprises SEQ ID NO: 541.

[0356] According to some embodiments, the CpGmin_hAAT promoter comprises a sequence selected from any one of SEQ ID NOs: 212, 213, 214, 215 or 216.

### (ii) Enhancers

[0357] In some embodiments, a ceDNA expressing FVIII comprises one or more enhancers. In some embodiments, an enhancer sequence is located 5′ of the promoter sequence. In some embodiments, the enhancer sequence is located 3′ of the promoter sequence. According to some embodiments, the enhancer is the enhancer region for Serpin1 gene (SerpEnh) as described by Chuah, M., et al. ((2014). Liver-Specific Transcriptional Modules Identified by Genome-Wide In Silico Analysis Enable Efficient Gene Therapy in Mice and Non-Human Primates Molecular Therapy, 22(9), 1605-1613, incorporated by reference in its entirety herein).

[0358] According to some embodiments, the sequence of the serpin enhancer (SerpEnh) is set forth in SEQ ID NO: 198.

[0359] According to some embodiments, the enhancer comprises a nucleic acid sequence at least about 85%, 90%, 95%, 96%, 97%, 98%, 99% identical to SEQ ID NO: 198.

[0360] According to some embodiments, the enhancer is the enhancer region for Transthyretin (TTRe) gene (TTRe). According to some embodiments, the sequence of the enhancer region for Transthyretin (TTRe) gene (TTRe) is set forth in SEQ ID NO: 199.

[0361] According to some embodiments, the enhancer comprises a nucleic acid sequence at least about 85%, 90%, 95%, 96%, 97%, 98%, 99% identical to SEQ ID NO: 199. According to some embodiments, the enhancer consists of SEQ ID NO: 199. According to some embodiments, the enhancer is the Hepatic Nuclear Factor 1 binding site (HNF1). According to some embodiments, the sequence of the Hepatic Nuclear Factor 1 binding site (HNF1) is set forth in SEQ ID NO: 200.

[0362] According to some embodiments, the enhancer comprises a nucleic acid sequence at least about 85%, 90%, 95%, 96%, 97%, 98%, 99% identical to SEQ ID NO: 200. According to some embodiments, the enhancer consists of SEQ ID NO: 200.

[0363] According to some embodiments, the enhancer is the Hepatic Nuclear Factor 4 binding site (HNF4). According to some embodiments, the sequence of the Hepatic Nuclear Factor 4 binding site (HNF4) is set forth in SEQ ID NO: 201.

[0364] According to some embodiments, the enhancer comprises a nucleic acid sequence at least about 85%, 90%, 95%, 96%, 97%, 98%, 99% identical to SEQ ID NO: 201. According to some embodiments, the enhancer consists of SEQ ID NO: 201.

[0365] According to some embodiments, the enhancer is the Human apolipoprotein E/C-I liver specific enhancer (ApoE_Enh). According to some embodiments, the sequence of the Human apolipoprotein E/C-I liver specific enhancer (ApoE_Enh) is set forth in SEQ ID NO: 202.

[0366] According to some embodiments, the enhancer comprises a nucleic acid sequence at least about 85%, 90%, 95%, 96%, 97%, 98%, 99% identical to SEQ ID NO: 202. According to some embodiments, the enhancer consists of SEQ ID NO: 202.

[0367] According to some embodiments, the enhancer is the Enhancer region from Pro-albumin gene (ProEnh). According to some embodiments, the sequence of the Enhancer region from Pro-albumin gene (ProEnh) is set forth in SEQ ID NO: 203.

[0368] According to some embodiments, the enhancer comprises a nucleic acid sequence at least about 85%, 90%, 95%, 96%, 97%, 98%, 99% identical to SEQ ID NO: 203. According to some embodiments, the enhancer consists of SEQ ID NO: 203.

[0369] According to some embodiments, the enhancer is a CpG minimized version of the ApoE_Enh (Human apolipoprotein E/C-I liver specific enhancer) (ApoE_Enh_C03, ApoE_Enh_C04, ApoE_Enh_C09, and ApoE_Enh_C10). According to some embodiments, the sequence of ApoE_Enh_C03, ApoE_Enh_C04, ApoE_Enh_C09 and ApoE_Enh_C10 are set forth in SEQ ID NO: 204, SEQ ID NO: 205, SEQ ID NO: 206 and SEQ ID NO: 207.

[0370] According to some embodiments, the enhancer comprises a nucleic acid sequence at least about 85%, 90%, 95%, 96%, 97%, 98%, 99% identical to SEQ ID NO: 204. According to some embodiments, the enhancer comprises, or consists of SEQ ID NO: 204.

[0371] According to some embodiments, the enhancer comprises a nucleic acid sequence at least about 85%, 90%, 95%, 96%, 97%, 98%, 99% identical to SEQ ID NO: 205. According to some embodiments, the enhancer comprises, or consists of SEQ ID NO: 205.

[0372] According to some embodiments, the enhancer comprises a nucleic acid sequence at least about 85%, 90%, 95%, 96%, 97%, 98%, 99% identical to SEQ ID NO: 206. According to some embodiments, the enhancer comprises, or consists of SEQ ID NO: 206. According to some embodiments, the enhancer comprises a nucleic acid sequence at least about 85%, 90%, 95%, 96%, 97%, 98%, 99% identical to SEQ ID NO: 207. According to some embodiments, the enhancer comprises, or consists of SEQ ID NO: 207.

[0373] According to some embodiments, the enhancer is the HCR1 footprint123 embedded in GE-856 (Embedded_HCR1_footprint123). According to some embodiments, the sequence of the HCR1 footprint123 embedded in GE-856 is set forth in SEQ ID NO: 208.

[0374] According to some embodiments, the enhancer comprises a nucleic acid sequence at least about 85%, 90%, 95%, 96%, 97%, 98%, 99% identical to SEQ ID NO: 208. According to some embodiments, the enhancer comprises, or consists of SEQ ID NO: 208.

[0375] According to some embodiments, the enhancer is the Hepatic nuclear factor enhancer array embedded in GE-856 (Embedded_enhancer_HNF_array). According to some embodiments, the sequence of the Hepatic nuclear factor enhancer array embedded in GE-856 is set forth in SEQ ID NO: 209.

[0376] According to some embodiments, the enhancer comprises a nucleic acid sequence at least about 85%, 90%, 95%, 96%, 97%, 98%, 99% identical to SEQ ID NO: 209. According to some embodiments, the enhancer comprises, or consists of SEQ ID NO: 209.

[0377] According to some embodiments, the enhancer is a derivative of Human apolipoprotein E/C-I liver specific enhancer (ApoE_enhancer_v2). According to some embodiments, the sequence of the ApoE_enhancer_v2 is set forth in SEQ ID NO: 485.

[0378] According to some embodiments, the enhancer comprises a nucleic acid sequence at least about 85%, 90%, 95%, 96%, 97%, 98%, 99% identical to SEQ ID NO: 485. According to some embodiments, the enhancer comprises, or consists of SEQ ID NO: 485.

[0379] According to some embodiments, the enhancer is a derivative of Serpin enhancer from bushbaby (Bushbaby SerpEnh). According to some embodiments, the bushbaby Serpin enhancer sequence is shown below as SEQ ID NO: 557:

GGGGGAAGCTACTGGTGAATATTAACCAAGGTCACCCAGTTATCAGGGAG
CAAACAGGAGCTAAGTCCAT
and set forth in SEQ ID NO: 557.

[0380] According to some embodiments, the enhancer comprises a nucleic acid sequence at least about 85%, 90%, 95%, 96%, 97%, 98%, 99% identical to SEQ ID NO: 557. According to some embodiments, the enhancer comprises, or consists of SEQ ID NO: 557. According to some other embodiments, the bushbaby Serpin enhancer comprises 2×, 3×, 4×, 5×, 6×, 7×, and up to 10× repeats of the nucleic acid sequence comprising SEQ ID NO: 557, with or without a spacer sequence between each iteration of the sequence.

[0381] According to some embodiments, the enhancer is a derivative of Serpin enhancer from Chinese tree shrew (Chinese tree shrew SerpEnh). According to some embodiments, the Chinese tree shrew Serpin enhancer sequence is as follows:

GGAGGCTGTTGGTGAATATTAACCAAGGTCACCTCAGTTATCGGAGGAGC
AAACAAGGGCTAAGTCCAC
and set forth in SEQ ID NO: 617.

[0382] According to some embodiments, the enhancer comprises a nucleic acid sequence at least about 95%, 96%, 97%, 98%, 99% identical to SEQ ID NO: 617. According to some embodiments, the enhancer comprises, or consists of SEQ ID NO: 617. According to some other embodiments, the bushbaby Serpin enhancer comprises 2×, 3×, 4×, 5×, 6×, 7×, and up to 10× repeats of the nucleic acid sequence comprising SEQ ID NO: 617, with or without a spacer sequence between each iteration.

[0383] According to some embodiments, the enhancer is a derivative of Serpin enhancer from human SERPINA1 enhancer with FOXA & HNF4 consensus sites and internal CpG removed (HNF4_FOXA_v1). According to some embodiments, the HNF4_FOXA_v1 Serpin enhancer sequence is as follows:

GGGGGAGGCTGCTGGTAAACATTAACCAAGGTCACCCCAGTTATCAGAGG
AGCAAACAGGGGCAAAGTCCAC
and set forth in SEQ ID NO: 625.

[0384] According to some embodiments, the enhancer comprises a nucleic acid sequence at least about 95%, 96%, 97%, 98%, 99% identical to SEQ ID NO: 625. According to some embodiments, the enhancer comprises, or consists of SEQ ID NO: 625. According to some other embodiments, the HNF4_FOXA_v1 Serpin enhancer comprises 2×, 3×, 4×, 1×, 6×, 7×, and up to 10× repeats of the nucleic acid sequence comprising SEQ ID NO: 625, with or without a spacer sequence between each iteration.

[0385] A summary of these enhancers that can be utilized in ceDNA FVIII constructs is listed in Table 7.

TABLE 7
Enhancers

| | | | SEQ ID |
|---|---|---|---|
| GE-## | Name (Abbreviation) | Description | NO. |
| GE-1115 | Human Serpin Enhancer | Enhancer region for Serpin1 gene as reported | 198 |
| | (hSerpEnh) | Chuah, M., et al. (2014). Liver-Specific | |
| | | Transcriptional Modules Identified by Genor | |
| | | Wide In Silico Analysis Enable Efficient Get | |
| | | Therapy in Mice and Non-Human Primates | |
| | | Molecular Therapy 22(9), 1605-1613. | |
| | | dx.doi.org/10.1038/mt.2014.114 | |
| GE-1116 | TTRe | Enhancer region for Transthyretin gene | 199 |
| GE-1117 | HNF1 | Hepatic Nuclear Factor 1 binding site | 200 |
| GE-1118 | HNF4 | Hepatic Nuclear Factor 4 binding site | 201 |
| GE-1119 | ApoE_Enh | Human apolipoprotein E/C-I liver specific | 202 |
| | | enhancer | |
| GE-1120 | ProEnh | Enhancer region from Pro-albumin gene | 203 |
| GE-1129 | ApoE_Enh_C03 | CpG minimized version of the ApoE_Enh | 204 |
| | | (Human apolipoprotein E/C-I liver specific | |
| | | enhancer) | |
| GE-1130 | ApoE_Enh_C04 | CpG minimized version of the ApoE_Enh | 205 |
| | | (Human apolipoprotein E/C-I liver specific | |
| | | enhancer) | |
| GE-1131 | ApoE_Enh_C09 | CpG minimized version of the ApoE_Enh | 206 |
| | | (Human apolipoprotein E/C-I liver specific | |
| | | enhancer) | |
| GE-1132 | ApoE_Enh_C10 | CpG minimized version of the ApoE_Enh | 207 |
| | | (Human apolipoprotein E/C-I liver specific | |
| | | enhancer) | |
| GE-1127 | Embedded_HCR1_footprint | HCR1 footprint123 embedded in GE-856 | 208 |
| | 123 | (aka between GE-859/GE-860) | |
| GE-1128 | Embedded_enhancer_HNF_ | Hepatic nuclear factor enhancer array | 209 |
| | array | embedded in GE-856 (aka between GE- | |
| | | 859/GE-860) | |
| GE-1237 | ApoE_Enh_v2 | Derivative of Human apolipoprotein E/C-I | 485 |
| | | liver specific enhancer | |
| | 3x_HNF4_FOXA_v1 | 3x repeat of the Human SERPINA1 enhancer | 558 |
| | | with FOXA & HNF4 consensus sites spacer | |
| | | in bold | |
| | 3x_HNF4_FOXA_v1_ | 3x repeat of HNF4_FOXA_v1 with CpG | 559 |
| | CpGmin | minimization | |
| | 3x_HNF4_FOXA_v1_ | 3x repeat of HNF4_FOXA_v1 with poly- | 560 |
| | SecondaryStruct_min_v1 | C/poly-G minimization v1 | |
| | 3x_HNF4_FOXA_v1_ | 3x repeat of HNF4_FOXA_v1 with poly- | 561 |
| | SecondaryStruct_min_ | C/poly-G minimization and CpG | |
| | v1_CpG_min | minimization v1 | |
| | 3x_HNF4_FOXA_v1_ | (3x repeat of HNF4_FOXA_v1 with poly- | 562 |
| | SecondaryStruct_min_v2 | C/poly-G minimization v2 (“C” spacer)) | |
| | 3x_HNF4_FOXA_v1_ | (3x repeat of HNF4_FOXA_v1 with poly- | 563 |
| | SecondaryStruct_min_ | C/poly-G minimization and CpG | |
| | v2_CpG_min | minimization v2 “A” spacer)) | |
| | 3x_HNF4_FOXA_v1_ | (3x repeat of HNF4_FOXA_v1 with poly- | 564 |
| | SecondaryStruct_min_v3 | C/poly-G minimization v3 (“C” spacer)) | |
| | 3x_HNF4_FOXA_v1_ | (3x repeat of HNF4_FOXA_v1 with poly- | 565 |
| | SecondaryStruct_min_ | C/poly-G minimization and CpG | |
| | v3_CpG_min | minimization v3 (“A”spacer)) | |
| | 3x_HNF4_FOXA_v1_ | (“A” spacer inbetween the repeats) (3x | 566 |
| | SecondaryStruct_ | repeat of HNF4_FOXA_v1 with poly- | |
| | min_v4_Aspacers | C/poly-G minimization v4 (2585)) | |
| | 3x_HNF4_FOXA_v1_ | (“A” spacer inbetween the repeats) (3x | 567 |
| | SecondaryStruct_min_ | repeat of HNF4_FOXA_v1 with poly- | |
| | v5_Aspacers | C/poly-G minimization v5) | |
| | 3x_HNF4_FOXA_v1_ | (“A” spacer inbetween the repeats) (3x | 568 |
| | SecondaryStruct_min_ | repeat of HNF4_FOXA_v1 with poly- | |
| | v6_Aspacers | C/poly-G minimization v6) | |
| | 3x_Chinese TreeShrew | (3x repeat of the Chinese Tree Shrew | 569 |
| | | SERPINA1 enhancer | |
| | | (“C” spancer inbetween the repeats)) | |
| | 3x_Chinese TreeShrew_CpG | (3x repeat of the Chinese Tree Shrew | 570 |
| | min | SERPINA1 enhancer with CpG | |
| | | minimization) | |
| | 3x_hSerpEnh_Aspacers | (3x repeat of the human SERPINA1 | 571 |
| | | enhancer with 1 adenine between the repeats | |
| | | (“A” spacer)) | |
| | 3x_Bushbaby_Aspacers | (3x repeat of the Bushbaby SERPINA1 | 572 |
| | | enhancer with adenine nucleotide spacer | |
| | | (“A” spacer)) | |
| | 5x_HNF4_FOXA_v1 | (5x repeat of HNF4_FOXA_v1 (“A” spacer)) | 573 |
| | 5x_HNF4_FOXA_v1_ | 5x repeat of HNF4_FOXA_v1 with poly- | 574 |
| | SecondaryStruct_min_v1 ( | C/poly-G minimization v1 (“A” spacer)) | |
| | 5x_HNF4_FOXA_v1_ | 5x repeat of HNF4_FOXA_v1 with poly- | 575 |
| | SecondaryStruct_min_v1_ | C/poly-G minimization and CpG | |
| | CpG_min | minimization v1 (“A” spacer)) | |
| | 5x_HNF4_FOXA_v1_ | (5x repeat of HNF4_FOXA_v1 with poly- | 576 |
| | SecondaryStruct_min_v2 | C/poly-G minimization v2 (“A” spacer)) | |
| | 5x_HNF4_FOXA_v1_ | 5x repeat of HNF4_FOXA_v1 with poly- | 577 |
| | SecondaryStruct_min_ | C/poly-G minimization and CpG | |
| | v2_CpG_min | minimization v2 (“A” spacer)) | |
| | 5x_HNF4_FOXA_v1_ | (5x repeat of HNF4_FOXA_v1 with poly- | 578 |
| | SecondaryStruct_min_v3 | C/poly-G minimization v3 (“A” spacer)) | |
| | 5x_HNF4_FOXA_v1_ | 5x repeat of HNF4_FOXA_v1 with poly- | 579 |
| | SecondaryStruct_min_ | C/poly-G minimization and CpG | |
| | v3_CpG_min | minimization v3) | |
| | 5x_HNF4_FOXA_ | (5x repeat of HNF4_FOXA_v1 with poly- | 580 |
| | v1_SecondaryStruct_ | C/poly-G minimization v4) | |
| | min_v4_Aspacers | | |
| | 5x_HNF4_FOXA_v1_ | (5x repeat of HNF4_FOXA_v1 with poly- | 581 |
| | SecondaryStruct_min_ | C/poly-G minimization v5 | |
| | v5_Aspacers) | | |
| | 5x_HNF4_FOXA_ | (5x repeat of HNF4_FOXA_v1 with poly- | 582 |
| | v1_SecondaryStruct_min_ | C/poly-G minimization v6) | |
| | v6_Aspacers | | |
| | 5x_Chinese TreeShrew | (5x repeat of the Chinese Tree Shrew | 583 |
| | | SERPINA1 enhancer) | |
| | 5x_Chinese TreeShrew_CpG | (5x repeat of the Chinese Tree Shrew | 584 |
| | min | SERPINA1 enhancer with CpG | |
| | | minimization) | |
| | 5x_Bushbaby_Aspacers | (5x repeat of the Bushbaby SERPINA1 | 585 |
| | | enhancer with adenenine nucleotide spacer) | |
| | 10x_HNF4_FOXA_v1 | (10x repeat of HNF4_FOXA_v1) | 586 |
| | 10x_HNF4_FOXA_v1_ | (10x repeat of HNF4_FOXA_v1 with poly- | 587 |
| | SecondaryStruct_min_v1 | C/poly-G minimization v1) | |
| | 10x_HNF4_FOXA_v1_ | (10x repeat of HNF4_FOXA_v1 with poly- | 588 |
| | SecondaryStruct_ | C/poly-G minimization and CpG | |
| | min_v1_CpG_min | minimization v1) | |
| | 10x_HNF4_FOXA_v1_ | (10x repeat of HNF4_FOXA_v1 with poly- | 589 |
| | SecondaryStruct_min_v2 | C/poly-G minimization v2) | |
| | 10x_HNF4_FOXA_v1_ | (10x repeat of HNF4_FOXA_v1 with poly- | 590 |
| | SecondaryStruct_ | C/poly-G minimization and CpG | |
| | min_v2_CpG_min | minimization v2) | |
| | 10x_HNF4_FOXA_v1_ | (10x repeat of HNF4_FOXA_v1 with poly- | 591 |
| | SecondaryStruct_min_v3 | C/poly-G minimization v3) | |
| | 10x_HNF4_FOXA_v1_ | (10x repeat of HNF4_FOXA_v1 with poly- | 592 |
| | SecondaryStruct_min_ | C/poly-G minimization and CpG | |
| | v3_CpG_min | minimization v3) | |
| | 10x_hSerpEnh | (10x repeat of the human SERPINA1 | 593 |
| | | enhancer (“C” spacer)) | |
| | 10x_Bushbaby_Aspacers | (10x repeat of the Bushbaby SERPINA1 | 594 |
| | | enhancer with adenenine nucleotide spacer) | |
| | Bushbaby_HN4F/FOXv1_ | (Bushbaby SERPINA1 enhancer, | 595 |
| | HNF4mod | FOXA_HNF4_v1 enhancer, HNF4 | |
| | | consensus binding site enhancer) | |
| | HNF4mod_BushbabyMod_ | (HNF4 consensus binding site enhancer, | 596 |
| | HN4F/FOXv1 | Bushbaby SERPINA1 enhancer, | |
| | | FOXA_HNF4_v1 enhancer) | |
| | 3x_hSerpEnh_2mer_spacers_ | (3x repeat of hSerpEnh with 2mer spacers v1 | 597 |
| | v1 | (bold underlined)) | |
| | 3x_hSerpEnh_2mer_spacers_ | (3x repeat of hSerpEnh with 2mer spacers v4 | 598 |
| | v4 | (bold underlined)) | |
| | 3x_hSerpEnh_2mer_spacers_ | (3x repeat of hSerpEnh with 2mer spacers v8 | 599 |
| | v8 | (bold underlined)) | |
| | 3x_hSerpEnh_2mer_spacers_ | (3x repeat of hSerpEnh with 2mer spacers v9 | 600 |
| | v9 | (bold underlined)) | |
| | 3x_hSerpEnh_2mer_spacers_ | (3x repeat of hSerpEnh with 2mer spacers | 601 |
| | v10 | v10 (bold underlined)) | |
| | 3x_hSerpEnh_2mer_spacers_ | (3x repeat of hSerpEnh with 2mer spacers | 602 |
| | v12 | v12 (bold underlined)) | |
| | 3x_hSerpEnh_2mer_spacers_ | (3x repeat of hSerpEnh with 2mer spacers | 603 |
| | v17 | v17 (bold underlined)) | |
| | 3x_hSerpEnh_3mer_spacers_ | (3x repeat of hSerpEnh with 3mer spacers v1 | 604 |
| | v1 | (bold underlined)) | |
| | 3x_hSerpEnh_3mer_spacers_ | (3x repeat of hSerpEnh with 3mer spacers v2 | 605 |
| | v2 | (bold underlined)) | |
| | 3x_hSerpEnh_5mer_spacers_ | (3x repeat of hSerpEnh with 5mer spacers v1 | 606 |
| | v1 | (bold underlined)) | |
| | 3x_hSerpEnh_5mer_spacers_ | (3x repeat of hSerpEnh with 5mer spacers v2 | 607 |
| | v2 | (bold underlined)) | |
| | 3x_hSerpEnh_5mer_spacers_ | (3x repeat of hSerpEnh with 5mer spacers v3 | 608 |
| | v3 | (bold underlined)) | |
| | 3x_hSerpEnh_11mer_ | (3x repeat of hSerpEnh with 11mer spacers | 609 |
| | spacers_v1 | v1 (bold underlined)) | |
| | 3x_hSerpEnh_11mer_spacers_ | (3x repeat of hSerpEnh with 11mer spacers | 610 |
| | 3x_hSerpEnh_11mer_ | (3x repeat of hSerpEnh with 11mer spacers | 611 |
| | spacers_v3 | v3 (bold underlined)) | |
| | 3x_hSerpEnh_11mer_spacers_ | (3x repeat of hSerpEnh with 11mer spacers | 612 |
| | HNF4former_spacers_ | (bold underlined) with HNF4 binding site in | |
| | FOXAfor | orientation 1 & FOXA binding site in | |
| | | orientation 1) | |
| | 3x_hSerpEnh_11mer_spacers | 11mer spacers (bold underlined) with HNF4 | 613 |
| | HNF4former_spacers_FOXArev | binding site in orientation 2 & FOXA | |
| | (3x repeat of hSerpEnh | binding site in orientation 1) | |
| | with 11mer spacers (bold | | |
| | underlined) with HNF4 | | |
| | binding site in orientation 1 & | | |
| | FOXA binding site in | | |
| | orientation 2) | | |
| | 3x_hSerpEnh_11mer_spacers_ | 11mer spacers (bold underlined) with HNF4 | 614 |
| | HNF4revmer_spacers_FOXAfor | binding site in orientation 2 & FOXA | |
| | (3x repeat of hSerpEnh | binding site in orientation 1) | |
| | with | | |
| | 3x_hSerpEnh_11mer_spacers | (3x repeat of hSerpEnh with 11mer spacers | 615 |
| | HNF4revmer_spacers_FOXArev | (bold underlined) with HNF4 binding site in | |
| | | orientation 2 & FOXA binding site in | |
| | | orientation 2) | |
| | 3x_hSerpEnh_30mer_ | (3x repeat of hSerpEnh with 30mer spacers | 616 |
| | spacers_v1 | v1 (bold underlined)) | |

[0386] In some other embodiments, the enhancers can be used in tandem.

### Promoter Sets

[0387] According to some embodiments, the promoter comprises a synthetic liver specific promoter set including enhancers and core promoter, without 5pUTR, referred to as a promoter set.

[0388] According to some embodiments, the 3×HNF1-4_ProEnh (Pro-albumin enhancer) enhancer fused to TTR promoter comprises the sequence set forth in SEQ ID NO: 184. According to some embodiments, the 3×HNF1-4_ProEnh (Pro-albumin enhancer) enhancer fused to 3× VanD-TTRe and TTR promoter comprises the sequence set forth in SEQ ID NO: 185.

[0389] According to some embodiments, the 5×HNF1_ProEnh_enhancer fused to TTR promoter comprises the sequence set forth in SEQ ID NO: 186. According to some embodiments, the 5×HNF1_ProEnh_enhancer fused to 3×SerpEnh VD-TTRe and TTR promoter comprises the sequence set forth in SEQ ID NO: 187.

[0390] According to some embodiments, the promoter set (promoter set 1471) comprises the sequence set forth as SEQ ID NO: 184.

[0391] According to some embodiments, the promoter comprises a nucleic acid sequence at least about 85% identical to SEQ ID NO: 184. According to some embodiments, the promoter comprises a nucleic acid sequence at least about 90% identical to SEQ ID NO: 184. According to some embodiments, the promoter comprises a nucleic acid sequence at least about 95% identical to SEQ ID NO: 184. According to some embodiments, the promoter comprises a nucleic acid sequence at least about 96% identical to SEQ ID NO: 184. According to some embodiments, the promoter comprises a nucleic acid sequence at least about 97% identical to SEQ ID NO: 184. According to some embodiments, the promoter comprises a nucleic acid sequence at least about 98% identical to SEQ ID NO: 184. According to some embodiments, the promoter comprises a nucleic acid sequence at least about 99% identical to SEQ ID NO: 184. According to some embodiments, the promoter consists of the nucleic acid sequence of SEQ ID NO: 184.

[0392] According to some embodiments, the promoter set (promoter set 1472) comprises the sequence set forth as SEQ ID NO: 185.

[0393] According to some embodiments, the promoter comprises a nucleic acid sequence at least about 85% identical to SEQ ID NO: 185. According to some embodiments, the promoter comprises a nucleic acid sequence at least about 90% identical to SEQ ID NO: 185. According to some embodiments, the promoter comprises a nucleic acid sequence at least about 95% identical to SEQ ID NO: 185. According to some embodiments, the promoter comprises a nucleic acid sequence at least about 96% identical to SEQ ID NO: 185. According to some embodiments, the promoter comprises a nucleic acid sequence at least about 97% identical to SEQ ID NO: 185. According to some embodiments, the promoter comprises a nucleic acid sequence at least about 98% identical to SEQ ID NO: 185. According to some embodiments, the promoter comprises a nucleic acid sequence at least about 99% identical to SEQ ID NO: 185. According to some embodiments, the promoter consists of the nucleic acid sequence of SEQ ID NO: 185.

[0394] According to some embodiments, the promoter set (promoter set 1473) comprises the sequence set forth as SEQ ID NO: 186.

[0395] According to some embodiments, the promoter comprises a nucleic acid sequence at least about 85% identical to SEQ ID NO: 186. According to some embodiments, the promoter comprises a nucleic acid sequence at least about 90% identical to SEQ ID NO: 186. According to some embodiments, the promoter comprises a nucleic acid sequence at least about 95% identical to SEQ ID NO: 186. According to some embodiments, the promoter comprises a nucleic acid sequence at least about 96% identical to SEQ ID NO: 186. According to some embodiments, the promoter comprises a nucleic acid sequence at least about 97% identical to SEQ ID NO: 186. According to some embodiments, the promoter comprises a nucleic acid sequence at least about 98% identical to SEQ ID NO: 186. According to some embodiments, the promoter comprises a nucleic acid sequence at least about 99% identical to SEQ ID NO: 186. According to some embodiments, the promoter consists of the nucleic acid sequence of SEQ ID NO: 186.

[0396] According to some embodiments, the promoter set (promoter set 1474) comprises the sequence set forth as SEQ ID NO: 187.

[0397] According to some embodiments, the promoter comprises a nucleic acid sequence at least about 85% identical to SEQ ID NO: 187. According to some embodiments, the promoter comprises a nucleic acid sequence at least about 90% identical to SEQ ID NO: 187. According to some embodiments, the promoter comprises a nucleic acid sequence at least about 95% identical to SEQ ID NO: 187. According to some embodiments, the promoter comprises a nucleic acid sequence at least about 96% identical to SEQ ID NO: 187. According to some embodiments, the promoter comprises a nucleic acid sequence at least about 97% identical to SEQ ID NO: 187. According to some embodiments, the promoter comprises a nucleic acid sequence at least about 98% identical to SEQ ID NO: 187. According to some embodiments, the promoter comprises a nucleic acid sequence at least about 99% identical to SEQ ID NO: 187. According to some embodiments, the promoter consists of the nucleic acid sequence of SEQ ID NO: 187.

[0398] According to some embodiments, the promoter set (promoter set 1475) comprises the sequence set forth as SEQ ID NO: 484.

[0399] According to some embodiments, the promoter comprises a nucleic acid sequence at least about 85% identical to SEQ ID NO: 484. According to some embodiments, the promoter comprises a nucleic acid sequence at least about 90% identical to SEQ ID NO: 484. According to some embodiments, the promoter comprises a nucleic acid sequence at least about 95% identical to SEQ ID NO: 484. According to some embodiments, the promoter comprises a nucleic acid sequence at least about 96% identical to SEQ ID NO: 484. According to some embodiments, the promoter comprises a nucleic acid sequence at least about 97% identical to SEQ ID NO: 484. According to some embodiments, the promoter comprises a nucleic acid sequence at least about 98% identical to SEQ ID NO: 484. According to some embodiments, the promoter comprises a nucleic acid sequence at least about 99% identical to SEQ ID NO: 484. According to some embodiments, the promoter consists of the nucleic acid sequence of SEQ ID NO: 484.

[0400] According to some embodiments, the promoter set (promoter set 1476) comprises the sequence set forth as SEQ ID NO: 189.

[0401] According to some embodiments, the promoter comprises a nucleic acid sequence at least about 85% identical to SEQ ID NO: 189. According to some embodiments, the promoter comprises a nucleic acid sequence at least about 90% identical to SEQ ID NO: 189. According to some embodiments, the promoter comprises a nucleic acid sequence at least about 95% identical to SEQ ID NO: 189. According to some embodiments, the promoter comprises a nucleic acid sequence at least about 96% identical to SEQ ID NO: 189. According to some embodiments, the promoter comprises a nucleic acid sequence at least about 97% identical to SEQ ID NO: 189. According to some embodiments, the promoter comprises a nucleic acid sequence at least about 98% identical to SEQ ID NO: 189. According to some embodiments, the promoter comprises a nucleic acid sequence at least about 99% identical to SEQ ID NO: 189. According to some embodiments, the promoter consists of the nucleic acid sequence of SEQ ID NO: 189.

[0402] According to some embodiments, the promoter set (promoter set 1477) comprises the sequence set forth as SEQ ID NO: 190.

[0403] According to some embodiments, the promoter comprises a nucleic acid sequence at least about 85% identical to SEQ ID NO: 190. According to some embodiments, the promoter comprises a nucleic acid sequence at least about 90% identical to SEQ ID NO: 190. According to some embodiments, the promoter comprises a nucleic acid sequence at least about 95% identical to SEQ ID NO: 190. According to some embodiments, the promoter comprises a nucleic acid sequence at least about 96% identical to SEQ ID NO: 190. According to some embodiments, the promoter comprises a nucleic acid sequence at least about 97% identical to SEQ ID NO: 190. According to some embodiments, the promoter comprises a nucleic acid sequence at least about 98% identical to SEQ ID NO: 190. According to some embodiments, the promoter comprises a nucleic acid sequence at least about 99% identical to SEQ ID NO: 190. According to some embodiments, the promoter consists of the nucleic acid sequence of SEQ ID NO: 190.

[0404] According to some embodiments, the promoter set (promoter set 1478) comprises the sequence set forth as SEQ ID NO: 191.

[0405] According to some embodiments, the promoter comprises a nucleic acid sequence at least about 85% identical to SEQ ID NO: 191. According to some embodiments, the promoter comprises a nucleic acid sequence at least about 90% identical to SEQ ID NO: 191. According to some embodiments, the promoter comprises a nucleic acid sequence at least about 95% identical to SEQ ID NO: 191. According to some embodiments, the promoter comprises a nucleic acid sequence at least about 96% identical to SEQ ID NO: 191. According to some embodiments, the promoter comprises a nucleic acid sequence at least about 97% identical to SEQ ID NO: 191. According to some embodiments, the promoter comprises a nucleic acid sequence at least about 98% identical to SEQ ID NO: 191. According to some embodiments, the promoter comprises a nucleic acid sequence at least about 99% identical to SEQ ID NO: 191. According to some embodiments, the promoter consists of the nucleic acid sequence of SEQ ID NO: 191.

[0406] According to some embodiments, the promoter set (promoter set 1479) comprises the sequence set forth as SEQ ID NO: 192.

[0407] According to some embodiments, the promoter comprises a nucleic acid sequence at least about 85% identical to SEQ ID NO: 192. According to some embodiments, the promoter comprises a nucleic acid sequence at least about 90% identical to SEQ ID NO: 192. According to some embodiments, the promoter comprises a nucleic acid sequence at least about 95% identical to SEQ ID NO: 192. According to some embodiments, the promoter comprises a nucleic acid sequence at least about 96% identical to SEQ ID NO: 192. According to some embodiments, the promoter comprises a nucleic acid sequence at least about 97% identical to SEQ ID NO: 192. According to some embodiments, the promoter comprises a nucleic acid sequence at least about 98% identical to SEQ ID NO: 192. According to some embodiments, the promoter comprises a nucleic acid sequence at least about 99% identical to SEQ ID NO: 192. According to some embodiments, the promoter consists of the nucleic acid sequence of SEQ ID NO: 192.

[0408] According to some embodiments, the promoter set (promoter set 1480) comprises the sequence set forth as SEQ ID NO: 193.

[0409] According to some embodiments, the promoter comprises a nucleic acid sequence at least about 85% identical to SEQ ID NO: 193. According to some embodiments, the promoter comprises a nucleic acid sequence at least about 90% identical to SEQ ID NO: 193. According to some embodiments, the promoter comprises a nucleic acid sequence at least about 95% identical to SEQ ID NO: 193. According to some embodiments, the promoter comprises a nucleic acid sequence at least about 96% identical to SEQ ID NO: 193. According to some embodiments, the promoter comprises a nucleic acid sequence at least about 97% identical to SEQ ID NO: 193. According to some embodiments, the promoter comprises a nucleic acid sequence at least about 98% identical to SEQ ID NO: 193. According to some embodiments, the promoter comprises a nucleic acid sequence at least about 99% identical to SEQ ID NO: 193. According to some embodiments, the promoter consists of the nucleic acid sequence of SEQ ID NO: 193.

[0410] According to some embodiments, the promoter set (promoter set 1368) comprises the sequence set forth as SEQ ID NO: 194.

[0411] According to some embodiments, the promoter comprises a nucleic acid sequence at least about 85% identical to SEQ ID NO: 194. According to some embodiments, the promoter comprises a nucleic acid sequence at least about 90% identical to SEQ ID NO: 194. According to some embodiments, the promoter comprises a nucleic acid sequence at least about 95% identical to SEQ ID NO: 194. According to some embodiments, the promoter comprises a nucleic acid sequence at least about 96% identical to SEQ ID NO: 194. According to some embodiments, the promoter comprises a nucleic acid sequence at least about 97% identical to SEQ ID NO: 194. According to some embodiments, the promoter comprises a nucleic acid sequence at least about 98% identical to SEQ ID NO: 194. According to some embodiments, the promoter comprises a nucleic acid sequence at least about 99% identical to SEQ ID NO: 194. According to some embodiments, the promoter consists of the nucleic acid sequence of SEQ ID NO: 194.

[0412] According to some embodiments, the promoter set (promoter set 1648) comprises the sequence set forth as SEQ ID NO: 195).

[0413] According to some embodiments, the promoter comprises a nucleic acid sequence at least about 85% identical to SEQ ID NO: 195. According to some embodiments, the promoter comprises a nucleic acid sequence at least about 90% identical to SEQ ID NO: 195. According to some embodiments, the promoter comprises a nucleic acid sequence at least about 95% identical to SEQ ID NO: 195. According to some embodiments, the promoter comprises a nucleic acid sequence at least about 96% identical to SEQ ID NO: 195. According to some embodiments, the promoter comprises a nucleic acid sequence at least about 97% identical to SEQ ID NO: 195. According to some embodiments, the promoter comprises a nucleic acid sequence at least about 98% identical to SEQ ID NO: 195. According to some embodiments, the promoter comprises a nucleic acid sequence at least about 99% identical to SEQ ID NO: 195. According to some embodiments, the promoter consists of the nucleic acid sequence of SEQ ID NO: 195.

[0414] According to some embodiments, the promoter set (promoter set 1657) comprises the sequence set forth as SEQ ID NO: 196.

[0415] According to some embodiments, the promoter comprises a nucleic acid sequence at least about 85% identical to SEQ ID NO: 196. According to some embodiments, the promoter comprises a nucleic acid sequence at least about 90% identical to SEQ ID NO: 196. According to some embodiments, the promoter comprises a nucleic acid sequence at least about 95% identical to SEQ ID NO: 196. According to some embodiments, the promoter comprises a nucleic acid sequence at least about 96% identical to SEQ ID NO: 196. According to some embodiments, the promoter comprises a nucleic acid sequence at least about 97% identical to SEQ ID NO: 196. According to some embodiments, the promoter comprises a nucleic acid sequence at least about 98% identical to SEQ ID NO: 196. According to some embodiments, the promoter comprises a nucleic acid sequence at least about 99% identical to SEQ ID NO: 196. According to some embodiments, the promoter consists of the nucleic acid sequence of SEQ ID NO: 196.

[0416] According to some embodiments, the promoter set (promoter set 1622) comprises the sequence set forth as SEQ ID NO: 197.

[0417] According to some embodiments, the promoter comprises a nucleic acid sequence at least about 85% identical to SEQ ID NO: 197. According to some embodiments, the promoter comprises a nucleic acid sequence at least about 90% identical to SEQ ID NO: 197. According to some embodiments, the promoter comprises a nucleic acid sequence at least about 95% identical to SEQ ID NO: 197. According to some embodiments, the promoter comprises a nucleic acid sequence at least about 96% identical to SEQ ID NO: 197. According to some embodiments, the promoter comprises a nucleic acid sequence at least about 97% identical to SEQ ID NO: 197. According to some embodiments, the promoter comprises a nucleic acid sequence at least about 98% identical to SEQ ID NO: 197. According to some embodiments, the promoter comprises a nucleic acid sequence at least about 99% identical to SEQ ID NO: 197. According to some embodiments, the promoter consists of the nucleic acid sequence of SEQ ID NO: 197.

[0418] According to some embodiments, the promoter set (promoter set 1664) comprises the sequence set forth as SEQ ID NO: 400.

[0419] According to some embodiments, the promoter comprises a nucleic acid sequence at least about 85% identical to SEQ ID NO: 400. According to some embodiments, the promoter comprises a nucleic acid sequence at least about 90% identical to SEQ ID NO: 400. According to some embodiments, the promoter comprises a nucleic acid sequence at least about 95% identical to SEQ ID NO: 400. According to some embodiments, the promoter comprises a nucleic acid sequence at least about 96% identical to SEQ ID NO: 400. According to some embodiments, the promoter comprises a nucleic acid sequence at least about 97% identical to SEQ ID NO: 400. According to some embodiments, the promoter comprises a nucleic acid sequence at least about 98% identical to SEQ ID NO: 400. According to some embodiments, the promoter comprises a nucleic acid sequence at least about 99% identical to SEQ ID NO: 400. According to some embodiments, the promoter consists of the nucleic acid sequence of SEQ ID NO: 400.

[0420] According to some embodiments, the promoter set (promoter set 979) comprises the sequence set forth as SEQ ID NO: 401.

[0421] According to some embodiments, the promoter comprises a nucleic acid sequence at least about 85% identical to SEQ ID NO: 401. According to some embodiments, the promoter comprises a nucleic acid sequence at least about 90% identical to SEQ ID NO: 401. According to some embodiments, the promoter comprises a nucleic acid sequence at least about 95% identical to SEQ ID NO: 401. According to some embodiments, the promoter comprises a nucleic acid sequence at least about 96% identical to SEQ ID NO: 401. According to some embodiments, the promoter comprises a nucleic acid sequence at least about 97% identical to SEQ ID NO: 401. According to some embodiments, the promoter comprises a nucleic acid sequence at least about 98% identical to SEQ ID NO: 401. According to some embodiments, the promoter comprises a nucleic acid sequence at least about 99% identical to SEQ ID NO: 401. According to some embodiments, the promoter comprises, or consists of, the nucleic acid sequence of SEQ ID NO: 401.

[0422] According to some embodiments, the promoter set (promoter set 2558) comprises the sequence set forth as SEQ ID NO: 617.

[0423] According to some embodiments, the promoter comprises a nucleic acid sequence at least about 85% identical to SEQ ID NO: 617. According to some embodiments, the promoter comprises a nucleic acid sequence at least about 90% identical to SEQ ID NO: 617. According to some embodiments, the promoter comprises a nucleic acid sequence at least about 95% identical to SEQ ID NO: 617. According to some embodiments, the promoter comprises a nucleic acid sequence at least about 96% identical to SEQ ID NO: 617. According to some embodiments, the promoter comprises a nucleic acid sequence at least about 97% identical to SEQ ID NO: 617. According to some embodiments, the promoter comprises a nucleic acid sequence at least about 98% identical to SEQ ID NO: 617. According to some embodiments, the promoter comprises a nucleic acid sequence at least about 99% identical to SEQ ID NO: 617. According to some embodiments, the promoter comprises, or consists of, the nucleic acid sequence of SEQ ID NO: 617.

[0424] According to some embodiments, the promoter set (promoter set 2559) comprises the sequence set forth as SEQ ID NO: 618.

[0425] According to some embodiments, the promoter comprises a nucleic acid sequence at least about 85% identical to SEQ ID NO: 618. According to some embodiments, the promoter comprises a nucleic acid sequence at least about 90% identical to SEQ ID NO: 618. According to some embodiments, the promoter comprises a nucleic acid sequence at least about 95% identical to SEQ ID NO: 618. According to some embodiments, the promoter comprises a nucleic acid sequence at least about 96% identical to SEQ ID NO: 618. According to some embodiments, the promoter comprises a nucleic acid sequence at least about 97% identical to SEQ ID NO: 618. According to some embodiments, the promoter comprises a nucleic acid sequence at least about 98% identical to SEQ ID NO: 618. According to some embodiments, the promoter comprises a nucleic acid sequence at least about 99% identical to SEQ ID NO: 618. According to some embodiments, the promoter comprises, or consists of, the nucleic acid sequence of SEQ ID NO: 618.

[0426] According to some embodiments, the promoter set (promoter set 2560) comprises the sequence set forth as SEQ ID NO: 619.

[0427] According to some embodiments, the promoter comprises a nucleic acid sequence at least about 85% identical to SEQ ID NO: 619. According to some embodiments, the promoter comprises a nucleic acid sequence at least about 90% identical to SEQ ID NO: 619. According to some embodiments, the promoter comprises a nucleic acid sequence at least about 95% identical to SEQ ID NO: 619. According to some embodiments, the promoter comprises a nucleic acid sequence at least about 96% identical to SEQ ID NO: 619. According to some embodiments, the promoter comprises a nucleic acid sequence at least about 97% identical to SEQ ID NO: 619. According to some embodiments, the promoter comprises a nucleic acid sequence at least about 98% identical to SEQ ID NO: 619. According to some embodiments, the promoter comprises a nucleic acid sequence at least about 99% identical to SEQ ID NO: 619. According to some embodiments, the promoter comprises, or consists of, the nucleic acid sequence of SEQ ID NO: 619.

[0428] According to some embodiments, the promoter set (promoter set 2580) comprises the sequence set forth as SEQ ID NO: 620.

[0429] According to some embodiments, the promoter comprises a nucleic acid sequence at least about 85% identical to SEQ ID NO: 620. According to some embodiments, the promoter comprises a nucleic acid sequence at least about 90% identical to SEQ ID NO: 620. According to some embodiments, the promoter comprises a nucleic acid sequence at least about 95% identical to SEQ ID NO: 620. According to some embodiments, the promoter comprises a nucleic acid sequence at least about 96% identical to SEQ ID NO: 620. According to some embodiments, the promoter comprises a nucleic acid sequence at least about 97% identical to SEQ ID NO: 620. According to some embodiments, the promoter comprises a nucleic acid sequence at least about 98% identical to SEQ ID NO: 620. According to some embodiments, the promoter comprises a nucleic acid sequence at least about 99% identical to SEQ ID NO: 620. According to some embodiments, the promoter comprises, or consists of, the nucleic acid sequence of SEQ ID NO: 620.

[0430] According to some embodiments, the promoter set (promoter set 2583) comprises the sequence set forth as SEQ ID NO: 621.

[0431] According to some embodiments, the promoter comprises a nucleic acid sequence at least about 85% identical to SEQ ID NO: 621. According to some embodiments, the promoter comprises a nucleic acid sequence at least about 90% identical to SEQ ID NO: 621. According to some embodiments, the promoter comprises a nucleic acid sequence at least about 95% identical to SEQ ID NO: 621. According to some embodiments, the promoter comprises a nucleic acid sequence at least about 96% identical to SEQ ID NO: 621. According to some embodiments, the promoter comprises a nucleic acid sequence at least about 97% identical to SEQ ID NO: 621. According to some embodiments, the promoter comprises a nucleic acid sequence at least about 98% identical to SEQ ID NO: 621. According to some embodiments, the promoter comprises a nucleic acid sequence at least about 99% identical to SEQ ID NO: 621. According to some embodiments, the promoter comprises, or consists of, the nucleic acid sequence of SEQ ID NO: 621.

[0432] According to some embodiments, the promoter set (promoter set 2584) comprises the sequence set forth as SEQ ID NO: 622.

[0433] According to some embodiments, the promoter comprises a nucleic acid sequence at least about 85% identical to SEQ ID NO: 622. According to some embodiments, the promoter comprises a nucleic acid sequence at least about 90% identical to SEQ ID NO: 622. According to some embodiments, the promoter comprises a nucleic acid sequence at least about 95% identical to SEQ ID NO: 622. According to some embodiments, the promoter comprises a nucleic acid sequence at least about 96% identical to SEQ ID NO: 622. According to some embodiments, the promoter comprises a nucleic acid sequence at least about 97% identical to SEQ ID NO: 622. According to some embodiments, the promoter comprises a nucleic acid sequence at least about 98% identical to SEQ ID NO: 622. According to some embodiments, the promoter comprises a nucleic acid sequence at least about 99% identical to SEQ ID NO: 622. According to some embodiments, the promoter comprises, or consists of, the nucleic acid sequence of SEQ ID NO: 622.

[0434] According to some embodiments, the promoter set (promoter set 2588) comprises the sequence set forth as SEQ ID NO: 623.

[0435] According to some embodiments, the promoter comprises a nucleic acid sequence at least about 85% identical to SEQ ID NO: 623. According to some embodiments, the promoter comprises a nucleic acid sequence at least about 90% identical to SEQ ID NO: 623. According to some embodiments, the promoter comprises a nucleic acid sequence at least about 95% identical to SEQ ID NO: 623. According to some embodiments, the promoter comprises a nucleic acid sequence at least about 96% identical to SEQ ID NO: 623. According to some embodiments, the promoter comprises a nucleic acid sequence at least about 97% identical to SEQ ID NO: 623. According to some embodiments, the promoter comprises a nucleic acid sequence at least about 98% identical to SEQ ID NO: 623. According to some embodiments, the promoter comprises a nucleic acid sequence at least about 99% identical to SEQ ID NO: 623. According to some embodiments, the promoter comprises, or consists of, the nucleic acid sequence of SEQ ID NO: 623.

[0436] According to some embodiments, the promoter set (promoter set 2589) comprises the sequence set forth as SEQ ID NO: 624.

[0437] According to some embodiments, the promoter comprises a nucleic acid sequence at least about 85% identical to SEQ ID NO: 624. According to some embodiments, the promoter comprises a nucleic acid sequence at least about 90% identical to SEQ ID NO: 624. According to some embodiments, the promoter comprises a nucleic acid sequence at least about 95% identical to SEQ ID NO: 624. According to some embodiments, the promoter comprises a nucleic acid sequence at least about 96% identical to SEQ ID NO: 624. According to some embodiments, the promoter comprises a nucleic acid sequence at least about 97% identical to SEQ ID NO: 624. According to some embodiments, the promoter comprises a nucleic acid sequence at least about 98% identical to SEQ ID NO: 624. According to some embodiments, the promoter comprises a nucleic acid sequence at least about 99% identical to SEQ ID NO: 624. According to some embodiments, the promoter comprises, or consists of, the nucleic acid sequence of SEQ ID NO: 624.

[0438] A summary of promoter sets that can be utilized in ceDNA FVIII constructs are shown in Table 8 and in Table 9.

TABLE 8
Promoter Sets

| | | | SEQ |
|---|---|---|---|
| GE | Name | Description | ID NO. |
| GE- | PromoterSet- | Synthetic Liver specific PromoterSet including | 184 |
| 1223 | 1471 | enhancers and core promoter (without 5pUTR) | |
| GE- | PromoterSet- | Synthetic Liver specific PromoterSet including | 185 |
| 1224 | 1472 | enhancers and core promoter (without 5pUTR) | |
| GE- | PromoterSet- | Synthetic Liver specific PromoterSet including | 186 |
| 1225 | 1473 | enhancers and core promoter (without 5pUTR) | |
| GE- | PromoterSet- | Synthetic Liver specific PromoterSet including | 187 |
| 1226 | 1474 | enhancers and core promoter (without 5pUTR) | |
| GE- | PromoterSet- | Synthetic Liver specific PromoterSet including | 188 |
| 1227 | 1475 | enhancers and core promoter (without 5pUTR) | |
| GE- | PromoterSet- | Synthetic Liver specific PromoterSet including | 189 |
| 1228 | 1476 | enhancers and core promoter (without 5pUTR) | |
| GE- | PromoterSet- | Synthetic Liver specific PromoterSet including | 190 |
| 1229 | 1477 | enhancers and core promoter (without 5pUTR) | |
| GE- | PromoterSet- | Synthetic Liver specific PromoterSet including | 191 |
| 1230 | 1478 | enhancers and core promoter (without 5pUTR) | |
| GE- | PromoterSet- | Synthetic Liver specific PromoterSet including | 192 |
| 1231 | 1479 | enhancers and core promoter (without 5pUTR) | |
| GE- | PromoterSet- | Synthetic Liver specific PromoterSet including | 193 |
| 1232 | 1480 | enhancers and core promoter (without 5pUTR) | |
| GE- | PromoterSet- | Synthetic Liver specific PromoterSet including | 194 |
| 1233 | 1368 | enhancers and core promoter (without 5pUTR) | |
| GE- | PromoterSet- | Synthetic Liver specific PromoterSet including | 195 |
| 1234 | 1648 | enhancers and core promoter (without 5pUTR) | |
| GE- | PromoterSet | Synthetic Liver specific PromoterSet including | 196 |
| 1235 | forceDNA1657 | enhancers and core promoter (without 5pUTR) | |
| GE- | PromoterSet- | Synthetic Liver specific PromoterSet including | 197 |
| 1236 | 1622 | enhancers and core promoter (without 5pUTR) | |
| GE- | PromoterSet- | Synthetic Liver specific PromoterSet including | 400 |
| 1270 | 1664 | enhancers and core promoter (without 5pUTR) | |
| GE- | PromoterSet- | Synthetic Liver specific PromoterSet including | 401 |
| 1271 | 979 | enhancers and core promoter (without 5pUTR) | |
| GE- | PromoterSet- | Promoter formed by contentation of 1) 3x | 641 |
| 1690 | 2558 | repeat of HNF4_FOXA_v1 with reduction of | |
| | | poly-C/poly-G sequences and reduction of | |
| | | CpGs introduced by multimerization and | |
| | | concatenation with backbone sequences (v1). | |
| | | Repeats are separated by an adenine. 2) KpnI | |
| | | site 3) enhancer region for the murine | |
| | | transthyretin gene 4) Xbal site and BamHI site | |
| | | 5) murine transthyretin promoter | |
| GE- | PromoterSet- | Promoter formed by contentation of 1) 3x | 618 |
| 1691 | 2559 | repeat of HNF4_FOXA_v1 with reduction of | |
| | | poly-C/poly-G sequences (v2). Repeats are | |
| | | separated by a cytosine. 2) KpnI site 3) | |
| | | enhancer region for the murine transthyretin | |
| | | gene 4) Xbal site and BamHI site 5) murine | |
| | | transthyretin promoter | |
| GE- | PromoterSet- | Promoter formed by contentation of 1) 3x | 619 |
| 1692 | 2560 | repeat of HNF4_FOXA_v1 with reduction of | |
| | | poly-C/poly-G sequences and reduction of | |
| | | CpGs introduced by multimerization and | |
| | | concatenation with backbone sequences (v2.) | |
| | | Repeats are separated by an adenine. 2) KpnI | |
| | | site 3) enhancer region for the murine | |
| | | transthyretin gene 4) Xbal site and BamHI | |
| | | site 5) murine transthyretin promoter | |
| GE- | PromoterSet- | Promoter formed by contentation of 1) 3x | 620 |
| 1693 | 2580 | repeat of the SerpEnh_Bushbaby enhancer | |
| | | with adenine nucleotide spacer. Repeats are | |
| | | separated by an adenine. 2) KpnI site 3) | |
| | | enhancer region for the murine transthyretin | |
| | | gene 4) Xbal site and BamHI site 5) murine | |
| | | transthyretin promoter | |
| GE- | PromoterSet- | Promoter formed by contentation of 1) 3 | 621 |
| 1694 | 2583 | SERPINA1 enhancer variants: a) | |
| | | SerpEnh_Bushbaby, b) HNF4_FOXA_v1, c) | |
| | | human SERPINA1 enhancer with an HNF4 | |
| | | consensus site, internal CpG removed, and | |
| | | poly-C/poly-G regions reduced 2) KpnI site 3) | |
| | | enhancer region for the murine transthyretin | |
| | | gene 4) Xbal site and BamHI site 5) murine | |
| | | transthyretin promoter | |
| GE- | PromoterSet- | Promoter formed by contentation of 1) 3 | 622 |
| 1695 | 2584 | SERPINA1 enhancer variants: a) human | |
| | | SERPINA1 enhancer with an HNF4 consensus | |
| | | site, internal CpG removed, and poly-C/poly-G | |
| | | regions reduced, b) SerpEnh_Bushbaby with | |
| | | the second G changed to A, c) | |
| | | FOXA_HNF4_v1, 2) KpnI site 3) enhancer | |
| | | region for the murine transthyretin gene 4) | |
| | | Xbal site and BamHI site 5) murine | |
| | | transthyretin promoter | |
| GE- | PromoterSet- | Promoter formed by contentation of 1) 3x | 623 |
| 1696 | 2588 | repeat of the Chinese Tree Shrew SERPINA1 | |
| | | enhancer. Repeats separated by a cytosine. 2) | |
| | | KpnI site 3) enhancer region for the murine | |
| | | transthyretin gene 4) Xbal site and BamHI site | |
| | | 5) murine transthyretin promoter | |
| GE- | PromoterSet- | Promoter formed by contentation of 1) 3x | 624 |
| 1697 | 2589 | repeat of the Chinese Tree Shrew SERPINA1 | |
| | | enhancer with CpG reduction. Repeats | |
| | | separated by an adenine. 2) KpnI site 3) | |
| | | enhancer region for the murine transthyretin | |
| | | gene 4) Xbal site and BamHI site 5) murine | |
| | | transthyretin promoter | |

TABLE 9
Promoter sets: Combinations of the hAAT CpG minimized
enhancer and core promoters CpG minimized hAAT
core_C10 (hAAT_979) or hAAT_core_C06); combinations
of the HNF4/FOXA-TTRe and TTR promoter; combinations of
the bushbaby variant enhancer repeats and TTRe and TTR
promoter; combinations of the Chinese tree shrew enhancer
repeats and TTRe and TTR promoter.

| Name | SEQ ID NO. |
|---|---|
| PromoterSet-970 | 402 |
| PromoterSet-971 | 403 |
| PromoterSet-972 | 404 |
| PromoterSet-973 | 405 |
| PromoterSet-974 | 406 |
| PromoterSet-975 | 407 |
| PromoterSet-976 | 408 |
| PromoterSet-977 | 409 |
| PromoterSet-978 | 410 |
| PromoterSet-2558 | 641 |
| PromoterSet-2559 | 618 |
| PromoterSet-2560 | 619 |
| PromoterSet-2580 | 620 |
| PromoterSet-2583 | 621 |
| PromoterSet-2584 | 622 |
| PromoterSet-2588 | 623 |
| PromoterSet-2589 | 624 |

[0439] According to some embodiments, the promoter comprises a nucleic acid sequence at least about 85% identical to SEQ ID NO: 402. According to some embodiments, the promoter comprises a nucleic acid sequence at least about 90% identical to SEQ ID NO: 402. According to some embodiments, the promoter comprises a nucleic acid sequence at least about 95% identical to SEQ ID NO: 402. According to some embodiments, the promoter comprises a nucleic acid sequence at least about 96% identical to SEQ ID NO: 402. According to some embodiments, the promoter comprises a nucleic acid sequence at least about 97% identical to SEQ ID NO: 402. According to some embodiments, the promoter comprises a nucleic acid sequence at least about 98% identical to SEQ ID NO: 402. According to some embodiments, the promoter comprises a nucleic acid sequence at least about 99% identical to SEQ ID NO: 402. According to some embodiments, the promoter comprises, or consists of the nucleic acid sequence of SEQ ID NO: 402.

[0440] According to some embodiments, the promoter comprises a nucleic acid sequence at least about 85% identical to SEQ ID NO: 403. According to some embodiments, the promoter comprises a nucleic acid sequence at least about 90% identical to SEQ ID NO: 403. According to some embodiments, the promoter comprises a nucleic acid sequence at least about 95% identical to SEQ ID NO: 403. According to some embodiments, the promoter comprises a nucleic acid sequence at least about 96% identical to SEQ ID NO: 403. According to some embodiments, the promoter comprises a nucleic acid sequence at least about 97% identical to SEQ ID NO: 403. According to some embodiments, the promoter comprises a nucleic acid sequence at least about 98% identical to SEQ ID NO: 403. According to some embodiments, the promoter comprises a nucleic acid sequence at least about 99% identical to SEQ ID NO: 403. According to some embodiments, the promoter comprises, or consists of the nucleic acid sequence of SEQ ID NO: 403.

[0441] According to some embodiments, the promoter comprises a nucleic acid sequence at least about 85% identical to SEQ ID NO: 404. According to some embodiments, the promoter comprises a nucleic acid sequence at least about 90% identical to SEQ ID NO: 404. According to some embodiments, the promoter comprises a nucleic acid sequence at least about 95% identical to SEQ ID NO: 404. According to some embodiments, the promoter comprises a nucleic acid sequence at least about 96% identical to SEQ ID NO: 404. According to some embodiments, the promoter comprises a nucleic acid sequence at least about 97% identical to SEQ ID NO: 404. According to some embodiments, the promoter comprises a nucleic acid sequence at least about 98% identical to SEQ ID NO: 404. According to some embodiments, the promoter comprises a nucleic acid sequence at least about 99% identical to SEQ ID NO: 404. According to some embodiments, the promoter comprises, or consists of the nucleic acid sequence of SEQ ID NO: 404.

[0442] According to some embodiments, the promoter comprises a nucleic acid sequence at least about 85% identical to SEQ ID NO: 405. According to some embodiments, the promoter comprises a nucleic acid sequence at least about 90% identical to SEQ ID NO: 405. According to some embodiments, the promoter comprises a nucleic acid sequence at least about 95% identical to SEQ ID NO: 405. According to some embodiments, the promoter comprises a nucleic acid sequence at least about 96% identical to SEQ ID NO: 405. According to some embodiments, the promoter comprises a nucleic acid sequence at least about 97% identical to SEQ ID NO: 405. According to some embodiments, the promoter comprises a nucleic acid sequence at least about 98% identical to SEQ ID NO: 405. According to some embodiments, the promoter comprises a nucleic acid sequence at least about 99% identical to SEQ ID NO: 405. According to some embodiments, the promoter comprises, or consists of the nucleic acid sequence of SEQ ID NO: 405.

[0443] According to some embodiments, the promoter comprises a nucleic acid sequence at least about 85% identical to SEQ ID NO: 406. According to some embodiments, the promoter comprises a nucleic acid sequence at least about 90% identical to SEQ ID NO: 406. According to some embodiments, the promoter comprises a nucleic acid sequence at least about 95% identical to SEQ ID NO: 406. According to some embodiments, the promoter comprises a nucleic acid sequence at least about 96% identical to SEQ ID NO: 406. According to some embodiments, the promoter comprises a nucleic acid sequence at least about 97% identical to SEQ ID NO: 406. According to some embodiments, the promoter comprises a nucleic acid sequence at least about 98% identical to SEQ ID NO: 406. According to some embodiments, the promoter comprises a nucleic acid sequence at least about 99% identical to SEQ ID NO: 406. According to some embodiments, the promoter comprises, or consists of the nucleic acid sequence of SEQ ID NO: 406.

[0444] According to some embodiments, the promoter comprises a nucleic acid sequence at least about 85% identical to SEQ ID NO: 407. According to some embodiments, the promoter comprises a nucleic acid sequence at least about 90% identical to SEQ ID NO: 407. According to some embodiments, the promoter comprises a nucleic acid sequence at least about 95% identical to SEQ ID NO: 407. According to some embodiments, the promoter comprises a nucleic acid sequence at least about 96% identical to SEQ ID NO: 407. According to some embodiments, the promoter comprises a nucleic acid sequence at least about 97% identical to SEQ ID NO: 407. According to some embodiments, the promoter comprises a nucleic acid sequence at least about 98% identical to SEQ ID NO: 407. According to some embodiments, the promoter comprises a nucleic acid sequence at least about 99% identical to SEQ ID NO: 407. According to some embodiments, the promoter comprises, or consists of the nucleic acid sequence of SEQ ID NO: 407.

[0445] According to some embodiments, the promoter comprises a nucleic acid sequence at least about 85% identical to SEQ ID NO: 408. According to some embodiments, the promoter comprises a nucleic acid sequence at least about 90% identical to SEQ ID NO: 408. According to some embodiments, the promoter comprises a nucleic acid sequence at least about 95% identical to SEQ ID NO: 408. According to some embodiments, the promoter comprises a nucleic acid sequence at least about 96% identical to SEQ ID NO: 408. According to some embodiments, the promoter comprises a nucleic acid sequence at least about 97% identical to SEQ ID NO: 408. According to some embodiments, the promoter comprises a nucleic acid sequence at least about 98% identical to SEQ ID NO: 408. According to some embodiments, the promoter comprises a nucleic acid sequence at least about 99% identical to SEQ ID NO: 408. According to some embodiments, the promoter comprises, or consists of the nucleic acid sequence of SEQ ID NO: 408.

[0446] According to some embodiments, the promoter comprises a nucleic acid sequence at least about 85% identical to SEQ ID NO: 409. According to some embodiments, the promoter comprises a nucleic acid sequence at least about 90% identical to SEQ ID NO: 409. According to some embodiments, the promoter comprises a nucleic acid sequence at least about 95% identical to SEQ ID NO: 409. According to some embodiments, the promoter comprises a nucleic acid sequence at least about 96% identical to SEQ ID NO: 409. According to some embodiments, the promoter comprises a nucleic acid sequence at least about 97% identical to SEQ ID NO: 409. According to some embodiments, the promoter comprises a nucleic acid sequence at least about 98% identical to SEQ ID NO: 409. According to some embodiments, the promoter comprises a nucleic acid sequence at least about 99% identical to SEQ ID NO: 409. According to some embodiments, the promoter comprises, or consists of the nucleic acid sequence of SEQ ID NO: 409.

[0447] According to some embodiments, the promoter comprises a nucleic acid sequence at least about 85% identical to SEQ ID NO: 410. According to some embodiments, the promoter comprises a nucleic acid sequence at least about 90% identical to SEQ ID NO: 410. According to some embodiments, the promoter comprises a nucleic acid sequence at least about 95% identical to SEQ ID NO: 410. According to some embodiments, the promoter comprises a nucleic acid sequence at least about 96% identical to SEQ ID NO: 410. According to some embodiments, the promoter comprises a nucleic acid sequence at least about 97% identical to SEQ ID NO: 410. According to some embodiments, the promoter comprises a nucleic acid sequence at least about 98% identical to SEQ ID NO: 410. According to some embodiments, the promoter comprises a nucleic acid sequence at least about 99% identical to SEQ ID NO: 410. According to some embodiments, the promoter comprises, or consists of the nucleic acid sequence of SEQ ID NO: 410.

[0448] According to some embodiments, the promoter comprises a nucleic acid sequence at least about 85% identical to SEQ ID NO: 617. According to some embodiments, the promoter comprises a nucleic acid sequence at least about 90% identical to SEQ ID NO: 617. According to some embodiments, the promoter comprises a nucleic acid sequence at least about 95% identical to SEQ ID NO: 617. According to some embodiments, the promoter comprises a nucleic acid sequence at least about 96% identical to SEQ ID NO: 617. According to some embodiments, the promoter comprises a nucleic acid sequence at least about 97% identical to SEQ ID NO: 617. According to some embodiments, the promoter comprises a nucleic acid sequence at least about 98% identical to SEQ ID NO: 617. According to some embodiments, the promoter comprises a nucleic acid sequence at least about 99% identical to SEQ ID NO: 617. According to some embodiments, the promoter comprises, or consists of the nucleic acid sequence of SEQ ID NO: 617.

[0449] According to some embodiments, the promoter comprises a nucleic acid sequence at least about 85% identical to SEQ ID NO: 618. According to some embodiments, the promoter comprises a nucleic acid sequence at least about 90% identical to SEQ ID NO: 618. According to some embodiments, the promoter comprises a nucleic acid sequence at least about 95% identical to SEQ ID NO: 618. According to some embodiments, the promoter comprises a nucleic acid sequence at least about 96% identical to SEQ ID NO: 618. According to some embodiments, the promoter comprises a nucleic acid sequence at least about 97% identical to SEQ ID NO: 618. According to some embodiments, the promoter comprises a nucleic acid sequence at least about 98% identical to SEQ ID NO: 618. According to some embodiments, the promoter comprises a nucleic acid sequence at least about 99% identical to SEQ ID NO: 618. According to some embodiments, the promoter comprises, or consists of the nucleic acid sequence of SEQ ID NO: 618.

[0450] According to some embodiments, the promoter comprises a nucleic acid sequence at least about 85% identical to SEQ ID NO: 619. According to some embodiments, the promoter comprises a nucleic acid sequence at least about 90% identical to SEQ ID NO: 619. According to some embodiments, the promoter comprises a nucleic acid sequence at least about 95% identical to SEQ ID NO: 619. According to some embodiments, the promoter comprises a nucleic acid sequence at least about 96% identical to SEQ ID NO: 619. According to some embodiments, the promoter comprises a nucleic acid sequence at least about 97% identical to SEQ ID NO: 619. According to some embodiments, the promoter comprises a nucleic acid sequence at least about 98% identical to SEQ ID NO: 619. According to some embodiments, the promoter comprises a nucleic acid sequence at least about 99% identical to SEQ ID NO: 619. According to some embodiments, the promoter comprises, or consists of the nucleic acid sequence of SEQ ID NO: 619.

[0451] According to some embodiments, the promoter comprises a nucleic acid sequence at least about 85% identical to SEQ ID NO: 620. According to some embodiments, the promoter comprises a nucleic acid sequence at least about 90% identical to SEQ ID NO: 620. According to some embodiments, the promoter comprises a nucleic acid sequence at least about 95% identical to SEQ ID NO: 620. According to some embodiments, the promoter comprises a nucleic acid sequence at least about 96% identical to SEQ ID NO: 620. According to some embodiments, the promoter comprises a nucleic acid sequence at least about 97% identical to SEQ ID NO: 620. According to some embodiments, the promoter comprises a nucleic acid sequence at least about 98% identical to SEQ ID NO: 620. According to some embodiments, the promoter comprises a nucleic acid sequence at least about 99% identical to SEQ ID NO: 620. According to some embodiments, the promoter comprises, or consists of the nucleic acid sequence of SEQ ID NO: 620.

[0452] According to some embodiments, the promoter comprises a nucleic acid sequence at least about 85% identical to SEQ ID NO: 621. According to some embodiments, the promoter comprises a nucleic acid sequence at least about 90% identical to SEQ ID NO: 621. According to some embodiments, the promoter comprises a nucleic acid sequence at least about 95% identical to SEQ ID NO: 621. According to some embodiments, the promoter comprises a nucleic acid sequence at least about 96% identical to SEQ ID NO: 621. According to some embodiments, the promoter comprises a nucleic acid sequence at least about 97% identical to SEQ ID NO: 621. According to some embodiments, the promoter comprises a nucleic acid sequence at least about 98% identical to SEQ ID NO: 621. According to some embodiments, the promoter comprises a nucleic acid sequence at least about 99% identical to SEQ ID NO: 621. According to some embodiments, the promoter comprises, or consists of the nucleic acid sequence of SEQ ID NO: 621.

[0453] According to some embodiments, the promoter comprises a nucleic acid sequence at least about 85% identical to SEQ ID NO: 622. According to some embodiments, the promoter comprises a nucleic acid sequence at least about 90% identical to SEQ ID NO: 622. According to some embodiments, the promoter comprises a nucleic acid sequence at least about 95% identical to SEQ ID NO: 622. According to some embodiments, the promoter comprises a nucleic acid sequence at least about 96% identical to SEQ ID NO: 622. According to some embodiments, the promoter comprises a nucleic acid sequence at least about 97% identical to SEQ ID NO: 622. According to some embodiments, the promoter comprises a nucleic acid sequence at least about 98% identical to SEQ ID NO: 622. According to some embodiments, the promoter comprises a nucleic acid sequence at least about 99% identical to SEQ ID NO: 622. According to some embodiments, the promoter comprises, or consists of the nucleic acid sequence of SEQ ID NO: 622.

[0454] According to some embodiments, the promoter comprises a nucleic acid sequence at least about 85% identical to SEQ ID NO: 623. According to some embodiments, the promoter comprises a nucleic acid sequence at least about 90% identical to SEQ ID NO: 623. According to some embodiments, the promoter comprises a nucleic acid sequence at least about 95% identical to SEQ ID NO: 623. According to some embodiments, the promoter comprises a nucleic acid sequence at least about 96% identical to SEQ ID NO: 623. According to some embodiments, the promoter comprises a nucleic acid sequence at least about 97% identical to SEQ ID NO: 623. According to some embodiments, the promoter comprises a nucleic acid sequence at least about 98% identical to SEQ ID NO: 623. According to some embodiments, the promoter comprises a nucleic acid sequence at least about 99% identical to SEQ ID NO: 623. According to some embodiments, the promoter comprises, or consists of the nucleic acid sequence of SEQ ID NO: 623.

[0455] According to some embodiments, the promoter comprises a nucleic acid sequence at least about 85% identical to SEQ ID NO: 624. According to some embodiments, the promoter comprises a nucleic acid sequence at least about 90% identical to SEQ ID NO: 624. According to some embodiments, the promoter comprises a nucleic acid sequence at least about 95% identical to SEQ ID NO: 624. According to some embodiments, the promoter comprises a nucleic acid sequence at least about 96% identical to SEQ ID NO: 624. According to some embodiments, the promoter comprises a nucleic acid sequence at least about 97% identical to SEQ ID NO: 624. According to some embodiments, the promoter comprises a nucleic acid sequence at least about 98% identical to SEQ ID NO: 624. According to some embodiments, the promoter comprises a nucleic acid sequence at least about 99% identical to SEQ ID NO: 624. According to some embodiments, the promoter comprises, or consists of the nucleic acid sequence of SEQ ID NO: 624.

[0456] (iii) 5′ UTR Sequences and Intron Sequences

[0457] In some embodiments, a ceDNA vector comprises a 5′ UTR sequence and/or an intron sequence that located 3′ of the 5′ ITR sequence. In some embodiments, the 5′ UTR is located 5′ of the transgene, e.g., sequence encoding the FVIII protein. According to some embodiments, the 5′ UTR sequence is selected from those listed in Table 10 below and in International Application No. PCT/US2020/021328, for example in Table 9A, incorporated by reference in its entirety herein.

TABLE 10
5′ UTR

| GE | | | SEQ ID |
|---|---|---|---|
| ## | Name | Description | NO. |
| GE-1124 | TTR-MVM-PmeI-Consensus- | 5pUTR formed form concatenation of 1) the | 411 |
| | 5pUTR | Transthyretin promoter 5pUTR, 2) Minute | |
| | | Virus of Mouse Intron, 3) Pmel restriction | |
| | | site, and 4) consensus kozak sequence | |
| GE- | TTR-MVM_v2-PmeI- | 5pUTR formed form concatenation of 1) the | 412 |
| 1125 | Consensus-5pUTR | Transthyretin promoter 5pUTR, 2) Minute | |
| | | Virus of Mouse Intron_v2, 3) PmeI | |
| | | restriction site, and 4) consensus kozak | |
| | | sequence | |
| GE- | TTR-MVM-PmeI*- | 5pUTR formed form concatenation of 1) the | 413 |
| 1126 | Consensus-5pUTR | Transthyretin promoter 5pUTR, 2) Minute | |
| | | Virus of Mouse Intron, 3) Mutated PmeI | |
| | | restriction site, and 4) consensus kozak | |
| | | sequence | |
| GE- | hAAT-5pUTR_v2 | 5pUTR region derived from SERPINA1 | 414 |
| 1138 | | (A1AT) gene | |
| GE- | TTR-MVMspliced-PmeI- | 5pUTR formed form concatenation of 1) the | 415 |
| 1167 | Consensus-5pUTR | Transthyretin promoter 5pUTR, 2) Spliced | |
| | | form of Minute Virus of Mouse Intron, 3) | |
| | | PmeI restriction site, and 4) consensus | |
| | | kozak sequence | |
| GE- | 5pUTR-325243 | 5pUTR variable region #325243 | 416 |
| 772 | | | |
| GE- | 5pUTR-constant | 5pUTR constant region | 417 |
| 774 | | | |
| GE- | hAAT-SV40-PmeI-Mod- | 5pUTR formed form concatenation of 1) the | 418 |
| 1208 | 5pUTR | hAAT promoter 5pUTR, 2) SV40 intron, 3) | |
| | | PmeI restriction site, and 4) modified kozak | |
| | | sequence | |
| GE- | hAAT-SV40-PmeI-Mod2- | 5pUTR formed form concatenation of 1) the | 419 |
| 1209 | 5pUTR | hAAT promoter 5pUTR, 2) SV40 intron, 3) | |
| | | PmeI restriction site, and 4) modified kozak | |
| | | sequence v2 | |
| GE- | hAAT-SV40-PmeI-Con- | 5pUTR formed form concatenation of 1) the | 420 |
| 1210 | 5pUTR | hAAT promoter 5pUTR, 2) SV40 intron, 3) | |
| | | PmeI restriction site, and 4) consensus | |
| | | kozak sequence | |
| GE- | hAAT-SV40-PmeI- | 5pUTR formed form concatenation of 1) the | 421 |
| 1211 | 325243-5pUTR | hAAT promoter 5pUTR, 2) SV40 intron, 3) | |
| | | PmeI restriction site, and 4) 325243-5pUTR | |
| GE- | hAAT-SV40-PmeI-536- | 5pUTR formed form concatenation of 1) the | 422 |
| 1212 | 5pUTR | hAAT promoter 5pUTR, 2) SV40 intron, 3) | |
| | | PmeI restriction site, and 4) 536-kozak | |
| GE- | TTR-Xbal-MVM-PmeI- | 5pUTR formed form concatenation of 1) the | 423 |
| 1219 | Consensus-5pUTR | Transthyretin promoter 5pUTR, 2) Xbal | |
| | | restriction site, 3)Minute Virus of Mouse | |
| | | Intron, 4) PmeI restriction site, and 5) | |
| | | consensus kozak sequence | |
| GE- | TTR-XbaI-MVM_v2- | 5pUTR formed form concatenation of 1) the | 424 |
| 1220 | PmeI-Consensus-5pUTR | Transthyretin promoter 5pUTR, 2) Xbal | |
| | | restriction site, 3) Minute Virus of Mouse | |
| | | Intron_v2, 4) PmeI restriction site, and 5) | |
| | | consensus kozak seqeunce | |
| GE- | TTR-XbaI-MVM-PmeI*- | 5pUTR formed form concatenation of 1) the | 425 |
| 1221 | Consensus-5pUTR | Transthyretin promoter 5pUTR, 2) Xbal | |
| | | restriction site, 3) Minute Virus of Mouse | |
| | | Intron, 4) Mutated PmeI restriction site, and | |
| | | 5) consensus kozak sequence | |
| GE- | TTR-5pUTR | 5pUTR from mouse Transthyretin gene | 426 |
| 1122 | | | |
| GE- | hAAT-PmeI-Mod2- | 5pUTR formed by concatenation of 1) the | 427 |
| 1260 | 5pUTR | hAAT promoter 5pUTR, 3) PmeI restriction | |
| | | site, and 4) modified kozak sequence v2 | |
| GE- | TTR-MVM_v2-PmeI- | 5pUTR formed by concatenation of 1) the | 428 |
| 1261 | Mod2-5pUTR | Transthyretin promoter 5pUTR, 2) Minute | |
| | | Virus of Mouse Intron_v2, 3) PmeI | |
| | | restriction site, and 4) | |
| | | Mod_Minimum_Consensus_Kozak_v2 | |
| GE- | TTR-MVM-PmeI- | 5pUTR formed by concatenation of 1) the | 429 |
| 1262 | 325243-5pUTR Copy | Transthyretin promoter 5pUTR, 2) Minute | |
| | | Virus of Mouse Intron, 3) PmeI restriction | |
| | | site, and 4) 325243-5pUTR | |
| GE- | TTR-MVM-PmeI*-Mod2- | 5pUTR formed by concatenation of 1) the | 430 |
| 1263 | 5pUTR | Transthyretin promoter 5pUTR, 2) Minute | |
| | | Virus of Mouse Intron, 3) Mutated PmeI | |
| | | restriction site, and 4) | |
| | | Mod_Minimum_Consensus_Kozak_v2 | |
| GE- | TTR-MVM-PmeI-Mod2- | 5pUTR formed by concatenation of 1) the | 431 |
| 1264 | 5pUTR | Transthyretin promoter 5pUTR, 2) Minute | |
| | | Virus of Mouse Intron, 3) PmeI restriction | |
| | | site, and 4) | |
| | | Mod_Minimum_Consensus_Kozak_v2 | |
| GE- | TTR-MVMspliced-PmeI- | 5pUTR formed by concatenation of 1) the | 432 |
| 1265 | Mod2-5pUTR | Transthyretin promoter 5pUTR, 2) Spliced | |
| | | form of Minute Virus of Mouse Intron, 3) | |
| | | PmeI restriction site, and 4) | |
| | | Mod_Minimum_Consensus_Kozak_v2 | |
| GE- | TTR-XbaI-MVM_v2- | 5pUTR formed by concatenation of 1) the | 433 |
| 1266 | PmeI-Mod2-5pUTR | Transthyretin promoter 5pUTR, 2) Xbal | |
| | | restriction site, 3) Minute Virus of Mouse | |
| | | Intron_v2, 4) PmeI restriction site, and 5) | |
| | | Mod_Minimum_Consensus_Kozak_v2 | |
| GE- | TTR-XbaI-MVM-PmeI*- | 5pUTR formed by concatenation of 1) the | 434 |
| 1267 | Mod2-5pUTR | Transthyretin promoter 5pUTR, 2) Xbal | |
| | | restriction site, 3) Minute Virus of Mouse | |
| | | Intron, 4) Mutated PmeI restriction site, and | |
| | | 5) Mod_Minimum_Consensus_Kozak_v2 | |
| GE- | TTR-XbaI-MVM-PmeI- | 5pUTR formed by concatenation of 1) the | 435 |
| 1268 | Mod2-5pUTR | Transthyretin promoter 5pUTR, 2) Xbal | |
| | | restriction site, 3) Minute Virus of Mouse | |
| | | Intron, 4) PmeI restriction site, and 5) | |
| | | Mod_Minimum_Consensus_Kozak_v2 | |
| GE- | hAAT-PmeI-Con-5pUTR | 5pUTR formed by concatenation of 1) the | 436 |
| 1269 | | hAAT promoter 5pUTR, 3) PmeI restriction | |
| | | site, and 4) Consensus Kozak Sequence | |

[0458] According to some embodiments, the 5′-UTR sequence comprises a nucleic acid sequence at least about 85%, 90%, 95%, 96%, 97%, 98%, 99% identical to, comprises, or consists of any one of the sequences set forth as SEQ ID NOS: 411-436.

[0459] According to some embodiment, a ceDNA vector comprises an intron sequence that is located 3′ of the 5′ ITR sequence. According to some embodiment, a ceDNA vector comprises an intron sequence that is located within the ORF of FVIII, inbetween two exons. According to some embodiments, the intron sequence is selected from those listed in Table 11 below, which provides the sequence identifier and a description of the intron.

TABLE 11
Introns

| SEQ ID NO | Description |
|---|---|
| 235 | Intron from Minute Virus of Mouse (MVM) |
| 236 | Intron from Minute Virus of Mouse with additional ‘G’ |
| | residue included in Splice Acceptor flanking sequence |
| 237 | Modified intron from SV40 virus |
| 238 | mini Factor VIII intron 1 chimera, 50 nucleotides from |
| | 5′-end of intron, 100 nucleotides from 3′-end of intron |
| 239 | mini Factor VIII intron 1 chimera, 50 nucleotides |
| | from 5′-end of intron, 200 nucleotides |
| | from 3′-end of intron |
| 240 | mini Factor VIII intron 1 chimera, 200 nucleotides |
| | from 5′-end of intron, 200 nucleotides |
| | from 3′-end of intron |
| 241 | mini Factor VIII intron 1 chimera, 500 nucleotides |
| | from 5′-end of intron, 500 nucleotides |
| | from 3′-end of intron |
| 242 | human beta globin intron 1 |
| 243 | Human Factor VIII intron 8 |
| 244 | Human Factor VIII intron 16 |
| 245 | first (5′) 200 bps of Factor VIII intron 1, used |
| | for annotation of embedded enhancers |
| 246 | last (3′) 200 bps of Factor VIII intron 1, used |
| | for annotation of embedded enhancers |
| 247 | Predicted Sequence of MVM intron (GE-023) |
| | post splicing |
| 248 | Intron from Minute Virus of Mouse with |
| | flanking exon regions removed |

[0460] According to some embodiments, the intron sequence comprises a nucleic acid sequence at least about 85%, 90%, 95%, 96%, 97%, 98%, 99% identical to SEQ ID NO: 235. According to some embodiments, the intron sequence comprises, or consists of SEQ ID NO: 235. According to some embodiments, the intron sequence comprises a nucleic acid sequence at least about 85%, 90%, 95%, 96%, 97%, 98%, 99% identical to SEQ ID NO: 236. According to some embodiments, the intron sequence comprises, or consists of SEQ ID NO: 236. According to some embodiments, the intron sequence comprises a nucleic acid sequence at least about 85%, 90%, 95%, 96%, 97%, 98%, 99% identical to SEQ ID NO: 237. According to some embodiments, the intron sequence comprises, or consists of SEQ ID NO: 237. According to some embodiments, the intron sequence comprises a nucleic acid sequence at least about 85%, 90%, 95%, 96%, 97%, 98%, 99% identical to SEQ ID NO: 238. According to some embodiments, the intron sequence comprises, or consists of SEQ ID NO: 238. According to some embodiments, the intron sequence comprises a nucleic acid sequence at least about 85%, 90%, 95%, 96%, 97%, 98%, 99% identical to SEQ ID NO: 239. According to some embodiments, the intron sequence comprises, or consists of SEQ ID NO: 239. According to some embodiments, the intron sequence comprises a nucleic acid sequence at least about 85%, 90%, 95%, 96%, 97%, 98%, 99% identical to SEQ ID NO: 240. According to some embodiments, the intron sequence comprises, or consists of SEQ ID NO: 240. According to some embodiments, the intron sequence comprises a nucleic acid sequence at least about 85%, 90%, 95%, 96%, 97%, 98%, 99% identical to SEQ ID NO: 241. According to some embodiments, the intron sequence comprises, or consists of SEQ ID NO: 241. According to some embodiments, the intron sequence comprises a nucleic acid sequence at least about 85%, 90%, 95%, 96%, 97%, 98%, 99% identical to SEQ ID NO: 242. According to some embodiments, the intron sequence comprises, or consists of SEQ ID NO: 242. According to some embodiments, the intron sequence comprises a nucleic acid sequence at least about 85%, 90%, 95%, 96%, 97%, 98%, 99% identical to SEQ ID NO: 243. According to some embodiments, the intron sequence comprises, or consists of SEQ ID NO: 243. According to some embodiments, the intron sequence comprises a nucleic acid sequence at least about 85%, 90%, 95%, 96%, 97%, 98%, 99% identical to SEQ ID NO: 244. According to some embodiments, the intron sequence consists of SEQ ID NO: 244. According to some embodiments, the intron sequence comprises a nucleic acid sequence at least about 85%, 90%, 95%, 96%, 97%, 98%, 99% identical to SEQ ID NO: 245. According to some embodiments, the intron sequence comprises, or consists of SEQ ID NO: 245. According to some embodiments, the intron sequence comprises a nucleic acid sequence at least about 85%, 90%, 95%, 96%, 97%, 98%, 99% identical to SEQ ID NO: 246. According to some embodiments, the intron sequence comprises, or consists of SEQ ID NO: 246. According to some embodiments, the intron sequence comprises a nucleic acid sequence at least about 85%, 90%, 95%, 96%, 97%, 98%, 99% identical to SEQ ID NO: 247. According to some embodiments, the intron sequence comprises, or consists of SEQ ID NO: 247. According to some embodiments, the intron sequence comprises a nucleic acid sequence at least about 85%, 90%, 95%, 96%, 97%, 98%, 99% identical to SEQ ID NO: 248. According to some embodiments, the intron sequence comprises, or consists of SEQ ID NO: 248.

### (iv) Exon Sequences

[0461] According to some embodiment, a ceDNA vector comprises an exon sequence. According to some embodiments, the exon sequence is selected from those listed in Table 12 below, which provides the sequence identifier and a description of the exon.

TABLE 12

| SEQ | |
|---|---|
| ID NO | Description |
| 293 | Exon1 from FVIII ORF hFVIII-F309S-BD226-Codop-run4-seq102-Afstyla-BDD with 33 bp |
| | of WT ORF sequence upstream of the splice donor site of intron1 |
| 294 | Exon2-26 from FVIII ORF hFVIII-F309S-BD226-Codop-run4-seq102-Afstyla-BDD with |
| | 33 bp of WT ORF sequence downstream of the splice acceptor site of intron1 |
| 295 | Exon1 from FVIII ORF_hFVIII-F309S-BD226seq124-Afstyla-BDD with 33 bp of WT ORF |
| | sequence upstream of the splice donor site of intron1 |
| 296 | Exon2-26 from FVIII ORF _hFVIII-F309S-BD226seq124-Afstyla-BDD with 33 bp of WT |
| | ORF sequence downstream of the splice acceptor site of intron1 |
| 297 | exon1 from FVIII ORF: hFVIII-F309S-BD226-Codop-run4-seq102-Afstyla-BDD |
| 298 | exon2-26 from FVIII ORF: hFVIII-F309S-BD226-Codop-run4-seq102-Afstyla-BDD |
| 299 | exon1 from FVIII ORF: hFVIII-F309S-BD226seq124-Afstyla-BDD |
| 300 | exon2-26 from FVIII ORF: _hFVIII-F309S-BD226seq124-Afstyla-BDD |
| 301 | 33 bp of WT hFVIII ORF sequence downstream of the splice acceptor site of intron1 |
| 302 | 33 bp of WT hFVIII ORF sequence upstream of the splice donor site of intron1 |

[0462] According to some embodiments, the exon sequence comprises a nucleic acid sequence at least about 85%, 90%, 95%, 96%, 97%, 98%, 99% identical to SEQ ID NO: 293. According to some embodiments, the exon sequence comprises, or consists of SEQ ID NO: 293. According to some embodiments, the exon sequence comprises a nucleic acid sequence at least about 85%, 90%, 95%, 96%, 97%, 98%, 99% identical to SEQ ID NO: 294. According to some embodiments, the exon sequence comprises, or consists of SEQ ID NO: 294. According to some embodiments, the exon sequence comprises a nucleic acid sequence at least about 85%, 90%, 95%, 96%, 97%, 98%, 99% identical to SEQ ID NO: 295. According to some embodiments, the exon sequence comprises, or consists of SEQ ID NO: 295. According to some embodiments, the exon sequence comprises a nucleic acid sequence at least about 85%, 90%, 95%, 96%, 97%, 98%, 99% identical to SEQ ID NO: 296. According to some embodiments, the exon sequence comprises, or consists of SEQ ID NO: 296. According to some embodiments, the exon sequence comprises a nucleic acid sequence at least about 85%, 90%, 95%, 96%, 97%, 98%, 99% identical to SEQ ID NO: 297. According to some embodiments, the exon sequence comprises, or consists of SEQ ID NO: 297. According to some embodiments, the exon sequence comprises a nucleic acid sequence at least about 85%, 90%, 95%, 96%, 97%, 98%, 99% identical to SEQ ID NO: 298. According to some embodiments, the exon sequence comprises, or consists of SEQ ID NO: 298. According to some embodiments, the exon sequence comprises a nucleic acid sequence at least about 85%, 90%, 95%, 96%, 97%, 98%, 99% identical to SEQ ID NO: 299. According to some embodiments, the exon sequence comprises, or consists of SEQ ID NO: 299. According to some embodiments, the exon sequence comprises a nucleic acid sequence at least about 85%, 90%, 95%, 96%, 97%, 98%, 99% identical to SEQ ID NO: 300. According to some embodiments, the exon sequence comprises, or consists of SEQ ID NO: 300. According to some embodiments, the exon sequence comprises a nucleic acid sequence at least about 85%, 90%, 95%, 96%, 97%, 98%, 99% identical to SEQ ID NO: 301. According to some embodiments, the exon sequence comprises, or consists of SEQ ID NO: 301. According to some embodiments, the exon sequence comprises a nucleic acid sequence at least about 85%, 90%, 95%, 96%, 97%, 98%, 99% identical to SEQ ID NO: 302. According to some embodiments, the exon sequence comprises, or consists of SEQ ID NO: 302.

[0463] (v) 3′ UTR Sequences

[0464] In some embodiments, a ceDNA vector comprises a 3′ UTR sequence that located 5′ of the 3′ ITR sequence. In some embodiments, the 3′ UTR is located 3′ of the transgene, e.g., sequence encoding the FVIII protein. According to some embodiments, the 3′ UTR sequence is selected from those listed in Table 13 below, which provides the sequence identifier and a description of the 3′ UTR.

TABLE 13

| SEQ | |
|---|---|
| ID | |
| NO | Description (name) |
| 283 | Poly A signal derived from gene |
| | encoding bovine growth hormone (bGH) |
| 284 | Postranscriptional regularoty element |
| | derived from Woodchuck Hepatitis Virus |
| | (WPRE_3pUTR) |
| 285 | PolyA region from SV40 virus (SV40_polyA) |
| 286 | Derived from Human hemoglobin |
| | beta (HBB) gene 3pUTR (HBB_3pUTR) |
| 287 | Derived from Human hemoglobin |
| | beta (HBB) gene 3pUTR (HBBv3_3pUTR) |
| 288 | Derived from Human hemoglobin |
| | beta (HBB) gene 3pUTR (HBBv2_3pUTR) |
| 289 | Derived from Human hemoglobin |
| | beta (HBB) gene 3pUTR (HBBv3_CpGmin) |
| 290 | Derived from Human hemoglobin |
| | beta (HBB) gene 3pUTR (HBBv2_CpGmin) |
| 291 | Derived from Human hemoglobin |
| | beta (HBB) gene 3pUTR |
| | (HBB-3pUTR-CpGmin_v1) |
| 634 | Shortened WPRE3 sequence with minimal |
| | gamma and alpha element (ref: |
| | https://www.ncbi.nlm.nih.gov/ |
| | pmc/articles/PMC3975461/), modified |
| | to remove ATG's generating |
| | cryptic ORFs > 25 aa (WPRE_3pUTR_v3-ATG) |

WPRE_3pUTR_v3-ATG
GTTAATCAACCTCTGGATTACAAAATTTGTGAAAGATTGACT
GATATTCTTAACTATGTTGCTCCTTTTACGCTGTGTGGATAC
GCTGCTTTATAGCCTCTGTATCTAGCTATTGCTTCCCGTACG
GCTTTCGTTTTCTCCTCCTTGTATAAATCCTGGTTAGTTCTT
GCCACGGCGGAACTCATCGCCGCCTGCCTTGCCCGCTGCTGG
ACAGGGGCTCGGCTGTTGGGCACTGACAATTCCGTGG
(SEQ ID NO: 634)

[0465] According to some embodiments, the 3′ UTR sequence comprises a nucleic acid sequence at least about 85%, 90%, 95%, 96%, 97%, 98%, 99% identical to SEQ ID NO: 283. According to some embodiments, the 3′ UTR sequence comprises, or consists of SEQ ID NO: 283. According to some embodiments, the 3′ UTR sequence comprises a nucleic acid sequence at least about 85%, 90%, 95%, 96%, 97%, 98%, 99% identical to SEQ ID NO: 284. According to some embodiments, the 3′ UTR sequence comprises, or consists of SEQ ID NO: 284. According to some embodiments, the 3′ UTR sequence comprises a nucleic acid sequence at least about 85%, 90%, 95%, 96%, 97%, 98%, 99% identical to SEQ ID NO: 285. According to some embodiments, the 3′ UTR sequence comprises, or consists of SEQ ID NO: 285. According to some embodiments, the 3′ UTR sequence comprises a nucleic acid sequence at least about 85%, 90%, 95%, 96%, 97%, 98%, 99% identical to SEQ ID NO: 286. According to some embodiments, the 3′ UTR sequence comprises, or consists of SEQ ID NO: 286. According to some embodiments, the 3′ UTR sequence comprises a nucleic acid sequence at least about 85%, 90%, 95%, 96%, 97%, 98%, 99% identical to SEQ ID NO: 287. According to some embodiments, the 3′ UTR sequence comprises, or consists of SEQ ID NO: 287. According to some embodiments, the 3′ UTR sequence comprises a nucleic acid sequence at least about 85%, 90%, 95%, 96%, 97%, 98%, 99% identical to SEQ ID NO: 288. According to some embodiments, the 3′ UTR sequence comprises, or consists of SEQ ID NO: 288. According to some embodiments, the 3′ UTR sequence comprises a nucleic acid sequence at least about 85%, 90%, 95%, 96%, 97%, 98%, 99% identical to SEQ ID NO: 289. According to some embodiments, the 3′ UTR sequence comprises, or consists of SEQ ID NO: 289. According to some embodiments, the 3′ UTR sequence comprises a nucleic acid sequence at least about 85%, 90%, 95%, 96%, 97%, 98%, 99% identical to SEQ ID NO: 290. According to some embodiments, the 3′ UTR sequence comprises, or consists of SEQ ID NO: 290. According to some embodiments, the 3′ UTR sequence comprises a nucleic acid sequence at least about 85%, 90%, 95%, 96%, 97%, 98%, 99% identical to SEQ ID NO: 291. According to some embodiments, the 3′ UTR sequence comprises, or consists of SEQ ID NO: 291. According to some embodiments, the 3′ UTR sequence comprises a nucleic acid sequence at least about 85%, 90%, 95%, 96%, 97%, 98%, 99% identical to SEQ ID NO: 634. According to some embodiments, the 3′ UTR sequence comprises, or consists of SEQ ID NO: 634.

[0466] (v) Polyadenylation Sequences:

[0467] A sequence encoding a polyadenylation sequence can be included in the ceDNA vector for expression of FVIII protein to stabilize an mRNA expressed from the ceDNA vector, and to aid in nuclear export and translation. In one embodiment, the ceDNA vector does not include a polyadenylation sequence. In other embodiments, the ceDNA vector for expression of FVIII protein includes at least 1, at least 2, at least 3, at least 4, at least 5, at least 10, at least 15, at least 20, at least 25, at least 30, at least 40, least 45, at least 50 or more adenine dinucleotides. In some embodiments, the polyadenylation sequence comprises about 43 nucleotides, about 40-50 nucleotides, about 40-55 nucleotides, about 45-50 nucleotides, about 35-50 nucleotides, or any range there between. The expression cassettes can include any poly-adenylation sequence known in the art or a variation thereof. In some embodiments, a poly-adenylation (polyA) sequence is selected from any of those listed in International Application No. PCT/US2020/021328, for example in Table 10, incorporated by reference in its entirety herein. Other polyA sequences commonly known in the art can also be used, e.g., including but not limited to, naturally occurring sequence isolated from bovine BGHpA (e.g., SEQ ID NO: 68) or a virus SV40 pA (e.g., SEQ ID NO: 86), or a synthetic sequence (e.g., SEQ ID NO: 87). Some expression cassettes can also include SV40 late polyA signal upstream enhancer (USE) sequence. In some embodiments, a USE sequence can be used in combination with SV40 pA or heterologous poly-A signal. PolyA sequences are located 3′ of the transgene encoding the FVIII protein. The expression cassettes can also include a post-transcriptional element to increase the expression of a transgene. In some embodiments, Woodchuck Hepatitis Virus (WHP) posttranscriptional regulatory element (WPRE) (e.g., SEQ ID NO: 67) is used to increase the expression of a transgene. Other posttranscriptional processing elements such as the post-transcriptional element from the thymidine kinase gene of herpes simplex virus, or hepatitis B virus (HBV) can be used. Secretory sequences can be linked to the transgenes, e.g., VH-02 and VK-A26 sequences, e.g., SEQ ID NO: 88 and SEQ ID NO: 89.

[0468] (vi) DNA Nuclear Targeting Sequences (DTS)

[0469] In some embodiments, the ceDNA vector for expression of FVIII protein comprises one or more DNA nuclear targeting sequences (DTS), for example, 1, 2, 3, 4, 5, 6, 7, 8, 9, 10, or more DTSs. In some embodiments, the one or more DTSs are located at or near the amino-terminus, at or near the carboxy-terminus, or a combination of these (e.g., one or more NLS at the amino-terminus and/or one or more NLS at the carboxy terminus). When more than one DTS is present, each can be selected independently of the others, such that a single DTS is present in more than one copy and/or in combination with one or more other DTSs present in one or more copies. According to some embodiments, the DTS is selected from those listed in Table 14 below, which provides the sequence identifier, a description of the DTS, and name.

TABLE 14

| SEQ | | |
|---|---|---|
| ID | | |
| NO | Description | Name |
| 303 | “nuclear factor kappa B (NFκB) transcription factor binding site | 3NF_DTS |
| | triplet, comprising three 10-bp κB sites (GGGACTTTCC (SEQ ID | |
| | NO: 546)) separated by a 5-bp optimized spacer (AGCTG)” | |
| 304 | CpG-minimized spacer optimized for priming in PCR | 3′DTS_primer_pad |
| 305 | CpG-minimized spacer optimized for priming in PCR | 5′DTS_primer_pad |
| 306 | 5X repeat of Igk kB motif 5′-GGGGACTTTCC-3′ (SEQ ID NO: | 5x_kB_mesika_DTS |
| | 548), 3 bp spacer, as described by Mesika et al., 2001 Mol Ther | |
| 307 | 2X repeat of glucocorticoid response element (GRE; origin not | 2x_GRE_dames_DTS |
| | described), SalI restriction site as spacer, as described by Dames et | |
| | al., 2007 J Gene Med | |
| 308 | Single CREB binding site as described by Badding et al., 2012 Gene | CREB_badding_DTS |
| | Ther | |
| 309 | 5x 72 bp tandem repeat from SV40 genome separated by random | SV40DNA_DTS_10mer |
| | CpG free 20 mer sequences. | Repeat |
| 310 | High activity, high affinity GRE binding site | 2x_Cgt_GRE_meijsing_ |
| | | DTS |
| 311 | 72 base pair single repeat region from SV40 genome. | SV40DNA_DTS_72 bp |
| | | SingleRepeat |
| 312 | 72 base pair tandem repeat region from SV40 genome. | SV40DNA_DTS_72 bp |
| | | TandemRepeat |
| 313 | 5x Dual SV40 Enhancer elements separated by CpGfree spacer | 10xSV40-DTS-arrray |
| | elements | |

B. Additional Components of ceDNA Vectors

[0470] The ceDNA vectors for expression of FVIII protein of the present disclosure may contain nucleotides that encode other components for gene expression.

[0471] (i) Ubiquitous Chromatin-Opening Elements (UCOEs)

[0472] According to some embodiments, the ceDNA vectors may further comprise Ubiquitous Chromatin-opening Elements (UCOEs), which structurally consist of methylation-free CpG islands encompassing single or dual divergently-transcribed housekeeping gene promoters, and are defined by their ability to consistently confer stable, site of integration-independent transgene expression that is proportional to copy number (Neville et al., Volume 35, Issue 5, September 2017, Pages 557-56).

[0473] According to some embodiments, the ceDNA vector for expression of FVIII protein comprises a minimal UCOE derived from CBX3 intergentic region, which comprises mutations to eliminate splice sites in the CBX3 intron region (CBX3(674mut1). According to some embodiments, the minimal UCOE comprises, or consists of, SEQ ID NO: 292.

[0474] According to some embodiments, the UCOE comprises a nucleic acid sequence at least about 85% identical to SEQ ID NO: 292. According to some embodiments, the UCOE comprises a nucleic acid sequence at least about 90% identical to SEQ ID NO: 292. According to some embodiments, the UCOE comprises a nucleic acid sequence at least about 95% identical to SEQ ID NO: 292. According to some embodiments, the UCOE comprises a nucleic acid sequence at least about 96% identical to SEQ ID NO: 292. According to some embodiments, the UCOE comprises a nucleic acid sequence at least about 97% identical to SEQ ID NO: 292. According to some embodiments, the UCOE comprises a nucleic acid sequence at least about 98% identical to SEQ ID NO: 292. According to some embodiments, the UCOE comprises a nucleic acid sequence at least about 99% identical to SEQ ID NO: 292. According to some embodiments, the UCOE comprises, or consists of the nucleic acid sequence of SEQ ID NO: 292.

[0475] (ii) Kozak Sequences

[0476] According to some embodiments, the ceDNA vectors may further comprise one or more Kozak sequences. According to some embodiments, the Kozak sequence is a consensus Kozak sequence. According to some embodiments, the Kozak sequence is a modified Kozak sequence. According to some embodiments, the Kozak sequence is a minimal Kozak sequence.

[0477] According to some embodiments, the consensus Kozak sequence (Consensus_Kozak) comprises GCCGCCACC (SEQ ID NO: 314). According to some embodiments, the modified consensus Kozak sequence (Mod_Minimum_Consensus_Kozak_v1) comprises AGCCACC (SEQ ID NO: 315). According to some embodiments, the modified consensus Kozak sequence (Mod_Minimum_Consensus_Kozak_v2) comprises CGCAGCCACC (SEQ ID NO: 316). According to some embodiments, the minimal consensus Kozak sequence (536_Kozak) comprises ACC (SEQ ID NO: 317).

[0478] (iii) Spacer Sequences

[0479] According to some embodiments, the ceDNA vectors may further comprise one or more spacer sequences. According to some embodiments, the spacer sequence is selected from one or more of those listed in Table 15 below, which provides the sequence identifier, a description of the spacer sequence and the name.

TABLE 15
Spacers

| SEQ ID NO | Description | Name |
|---|---|---|
| 318 | Synthetic Spacer Sequence | spacer_left-ITR_v1 |
| 319 | Synthetic Spacer Sequence | spacer_left-ITR_v2.1 |
| 320 | Synthetic Spacer Sequence | spacer_right-ITR_v1 |
| 321 | CpG-free 20 bp spacer sequence | CpGfree20mer_1 |
| 322 | CpG-free 20 bp spacer sequence | CpGfree20mer_2 |
| 323 | CpG-free 20 bp spacer sequence | CpGfree20mer_3 |
| 324 | CpG-free 20 bp spacer sequence | CpGfree20mer_4 |
| 325 | CpG-free 20 bp spacer sequence | CpGfree20mer_5 |
| 326 | CpG-free 20 bp spacer sequence | CpGfree20mer_6 |
| 327 | CpG-free 20 bp spacer sequence | CpGfree20mer_6B |
| 328 | CpG-free synthetic spacer | Sp100-1 |
| 329 | CpG-free synthetic spacer | Sp800-1 |
| 330 | CpG-free synthetic spacer | Sp400-1 |
| 331 | CpG-free synthetic spacer | Sp200-3 |
| 332 | CpG-free synthetic spacer | Sp200-2 |
| 634 | CpG-free Left ITR spacer with SbfI | Spacer_Left-ITR_v7 |
| | site | |
| 635 | Left ITR spacer with NotI site | Spacer_Left-ITR_v8 |
| 636 | CpG-free Left ITR spacer with MfeI | Spacer_Left-ITR_v9 |
| | site v1 | |
| 637 | CpG-free Left ITR spacer with MfeI | Spacer_Left-ITR_v10 |
| | site v2 | |
| 638 | CpG-free Left ITR spacer with MfeI | Spacer_Left-ITR_v11 |
| | site v3 | |
| 639 | CpG-free Right ITR spacer v1 | Spacer_Right-ITR_v7 |
| 640 | CpG-free Right ITR spacer v2 | Spacer_Right-ITR_v8 |

[0480] According to some embodiments, the spacer sequence comprises a nucleic acid sequence at least about 85%, 90%, 95%, 96%, 97%, 98%, 99% identical to, comprises, or consists of SEQ ID NO: 318. According to some embodiments, the spacer sequence comprises a nucleic acid sequence at least about 85%, 90%, 95%, 96%, 97%, 98%, 99% identical to, comprises, or consists of SEQ ID NO: 319. According to some embodiments, the spacer sequence comprises a nucleic acid sequence at least about 85%, 90%, 95%, 96%, 97%, 98%, 99% identical to, comprises, or consists of SEQ ID NO: 320. According to some embodiments, the spacer sequence comprises a nucleic acid sequence at least about 85%, 90%, 95%, 96%, 97%, 98%, 99% identical to, comprises, or consists of SEQ ID NO: 321. According to some embodiments, the spacer sequence comprises a nucleic acid sequence at least about 85%, 90%, 95%, 96%, 97%, 98%, 99% identical to, comprises, or consists of SEQ ID NO: 322. According to some embodiments, the spacer sequence comprises a nucleic acid sequence at least about 85%, 90%, 95%, 96%, 97%, 98%, 99% identical to, comprises, or consists of SEQ ID NO: 323. According to some embodiments, the spacer sequence comprises a nucleic acid sequence at least about 85%, 90%, 95%, 96%, 97%, 98%, 99% identical to, comprises, or consists of SEQ ID NO: 324. According to some embodiments, the spacer sequence comprises a nucleic acid sequence at least about 85%, 90%, 95%, 96%, 97%, 98%, 99% identical to, comprises, or consists of SEQ ID NO: 325. According to some embodiments, the spacer sequence comprises a nucleic acid sequence at least about 85%, 90%, 95%, 96%, 97%, 98%, 99% identical to, comprises, or consists of SEQ ID NO: 326. According to some embodiments, the spacer sequence comprises a nucleic acid sequence at least about 85%, 90%, 95%, 96%, 97%, 98%, 99% identical to, comprises, or consists of SEQ ID NO: 327. According to some embodiments, the spacer sequence comprises a nucleic acid sequence at least about 85%, 90%, 95%, 96%, 97%, 98%, 99% identical to, comprises, or consists of SEQ ID NO: 328. According to some embodiments, the spacer sequence comprises a nucleic acid sequence at least about 85%, 90%, 95%, 96%, 97%, 98%, 99% identical to, comprises, or consists of SEQ ID NO: 329. According to some embodiments, the spacer sequence comprises a nucleic acid sequence at least about 85%, 90%, 95%, 96%, 97%, 98%, 99% identical to, comprises, or consists of SEQ ID NO: 330. According to some embodiments, the spacer sequence comprises a nucleic acid sequence at least about 85%, 90%, 95%, 96%, 97%, 98%, 99% identical to, comprises, or consists of SEQ ID NO: 331. According to some embodiments, the spacer sequence comprises a nucleic acid sequence at least about 85%, 90%, 95%, 96%, 97%, 98%, 99% identical to, comprises, or consists of SEQ ID NO: 332. According to some embodiments, the spacer sequence comprises a nucleic acid sequence at least about 85%, 90%, 95%, 96%, 97%, 98%, 99% identical to, comprises, or consists of SEQ ID NO: 634. According to some embodiments, the spacer sequence comprises a nucleic acid sequence at least about 85%, 90%, 95%, 96%, 97%, 98%, 99% identical to, comprises, or consists of SEQ ID NO: 635. According to some embodiments, the spacer sequence comprises a nucleic acid sequence at least about 85%, 90%, 95%, 96%, 97%, 98%, 99% identical to, comprises, or consists of SEQ ID NO: 636. According to some embodiments, the spacer sequence comprises a nucleic acid sequence at least about 85%, 90%, 95%, 96%, 97%, 98%, 99% identical to, comprises, or consists of SEQ ID NO: 637. According to some embodiments, the spacer sequence comprises a nucleic acid sequence at least about 85%, 90%, 95%, 96%, 97%, 98%, 99% identical to, comprises, or consists of SEQ ID NO: 638. According to some embodiments, the spacer sequence comprises a nucleic acid sequence at least about 85%, 90%, 95%, 96%, 97%, 98%, 99% identical to, comprises, or consists of SEQ ID NO: 639. According to some embodiments, the spacer sequence comprises a nucleic acid sequence at least about 85%, 90%, 95%, 96%, 97%, 98%, 99% identical to, comprises, or consists of SEQ ID NO: 640.

[0481] (iv) Leader Sequences

[0482] According to some embodiments, the ceDNA vectors may further comprise one or more leader sequences. According to some embodiments, the leader sequence is selected from one or more of those listed in Table 16 below, which provides the sequence identifier, a description of the leader sequence and the name.

TABLE 16
Leader Sequences

| SEQ ID NO | Description | Name |
|---|---|---|
| 249 | Albumin leader sequence codon optimization #1 | ALB-NS-CAI-v2 |
| 250 | Albumin leader sequence codon optimization #2 | ALB-NS-struct |
| 251 | Albumin leader sequence codon optimization #3 | ALB-SSv1 |
| 252 | CD33 leader sequence codon optimization #1 | CD33-NS-CAI-v2 |
| 253 | CD33 leader sequence codon optimization #2 | CD33-NS-struct |
| 254 | CD33 leader sequence codon optimization #3 | CD33-SSv1 |
| 255 | Chymotrypsinogen leader sequence codon | CHY-NS-CAI-v2 |
| | optimization #1 | |
| 256 | Chymotrypsinogen leader sequence codon | CHY-NS-struct |
| | optimization #2 | |
| 257 | Chymotrypsinogen leader sequence codon | CHY-SSv1 |
| | optimization #3 | |
| 258 | Gaussia leader sequence codon optimization #1 | Gaus-CAI-v2 |
| 259 | Gaussia leader sequence codon optimization #2 | Gaus-NS-struct-v2 |
| 260 | Gaussia leader sequence codon optimization #3 | Gaus-SSv1 |
| 261 | IL-2 leader sequence codon optimization #1 | IL2-NS-CAI |
| 262 | IL-2 leader sequence codon optimization #2 | IL2-NS-struct |
| 263 | IL-2 leader sequence codon optimization #3 | IL2-SSv1 |
| 264 | Fibroin-L leader sequence codon optimization #1 | Lonz-NS-CAI-v1 |
| 265 | Fibroin-L leader sequence codon optimization #2 | Lonz-NS-struct-v2 |
| 266 | Fibroin-L leader sequence codon optimization #3 | Lonz-SSv1 |
| 267 | Secrecon leader sequence v1 codon optimization | Secrecon-v1-NS-CAI- |
| | #1 | v2 |
| 268 | Secrecon leader sequence v1 codon optimization | Secrecon-v1-NS-struct |
| | #2 | |
| 269 | Secrecon leader sequence v1 codon optimization | Secrecon-SSv1 |
| | #3 | |
| 270 | Secrecon leader sequence v2 codon optimization | Secrecon-SSv2 |
| | #3 | |
| 271 | trans plasminogen activator leader sequence | tPA-NS-CAI-v2 |
| | codon optimization #1 | |
| 272 | trans plasminogen activator leader sequence | tPA-NS-struct |
| | codon optimization #2 | |
| 273 | trans plasminogen activator leader sequence | tPA-SSv1 |
| | codon optimization #3 | |
| 274 | Trypsinogen leader sequence codon optimization | TRYP-NS-CAI-v2 |
| | #1 | |
| 275 | Trypsinogen leader sequence codon optimization | TRYP-NS-struct-v2 |
| | #2 | |
| 276 | Trypsinogen leader sequence codon optimization | TRYP-SSv2 |
| | #3 | |
| 277 | Fibroin-L leader sequence codon optimization #1 | LonzB-NS-CAI-v1 |
| | truncated to remove terminal ‘QV’ residues | |
| 278 | Fibroin-L leader sequence codon optimization #2 | LonzB-NS-struct-v2 |
| | truncated to remove terminal ‘QV’ residues | |
| 279 | Fibroin-L leader sequence codon optimization #3 | LonzB-SSv1 |
| | truncated to remove terminal ‘QV’ residues | |
| 280 | A1AT leader sequence codon optimization #1 | A1AT-NS-CAI-v2 |
| 281 | A1AT leader sequence codon optimization #2 | A1AT-NS-struct |
| 282 | A1AT leader sequence codon optimization #3 | A1AT-SSv3 |

[0483] According to some embodiments, the leader sequence comprises a nucleic acid sequence at least about 85%, 90%, 95%, 96%, 97%, 98%, 99% identical to, comprises, or consists of SEQ ID NO: 249. According to some embodiments, the leader sequence comprises a nucleic acid sequence at least about 85%, 90%, 95%, 96%, 97%, 98%, 99% identical to, comprises, or consists of SEQ ID NO: 250. According to some embodiments, the leader sequence comprises a nucleic acid sequence at least about 85%, 90%, 95%, 96%, 97%, 98%, 99% identical to, comprises, or consists of SEQ ID NO: 251. According to some embodiments, the leader sequence comprises a nucleic acid sequence at least about 85%, 90%, 95%, 96%, 97%, 98%, 99% identical to, comprises, or consists of SEQ ID NO: 252. According to some embodiments, the leader sequence comprises a nucleic acid sequence at least about 85%, 90%, 95%, 96%, 97%, 98%, 99% identical to, comprises, or consists of SEQ ID NO: 253. According to some embodiments, the leader sequence comprises a nucleic acid sequence at least about 85%, 90%, 95%, 96%, 97%, 98%, 99% identical to, comprises, or consists of SEQ ID NO: 254. According to some embodiments, the leader sequence comprises a nucleic acid sequence at least about 85%, 90%, 95%, 96%, 97%, 98%, 99% identical to, comprises, or consists of SEQ ID NO: 255. According to some embodiments, the leader sequence comprises a nucleic acid sequence at least about 85%, 90%, 95%, 96%, 97%, 98%, 99% identical to, comprises, or consists of SEQ ID NO: 256. According to some embodiments, the leader sequence comprises a nucleic acid sequence at least about 85%, 90%, 95%, 96%, 97%, 98%, 99% identical to, comprises, or consists of SEQ ID NO: 257. According to some embodiments, the leader sequence comprises a nucleic acid sequence at least about 85%, 90%, 95%, 96%, 97%, 98%, 99% identical to, comprises, or consists of SEQ ID NO: 258. According to some embodiments, the leader sequence comprises a nucleic acid sequence at least about 85%, 90%, 95%, 96%, 97%, 98%, 99% identical to, comprises, or consists of SEQ ID NO: 259. According to some embodiments, the leader sequence comprises a nucleic acid sequence at least about 85%, 90%, 95%, 96%, 97%, 98%, 99% identical to, comprises, or consists of SEQ ID NO: 260. According to some embodiments, the leader sequence comprises a nucleic acid sequence at least about 85%, 90%, 95%, 96%, 97%, 98%, 99% identical to, comprises, or consists of SEQ ID NO: 261. According to some embodiments, the leader sequence comprises a nucleic acid sequence at least about 85%, 90%, 95%, 96%, 97%, 98%, 99% identical to, comprises, or consists of SEQ ID NO: 262. According to some embodiments, the leader sequence comprises a nucleic acid sequence at least about 85%, 90%, 95%, 96%, 97%, 98%, 99% identical to, comprises, or consists of SEQ ID NO: 263. According to some embodiments, the leader sequence comprises a nucleic acid sequence at least about 85%, 90%, 95%, 96%, 97%, 98%, 99% identical to, comprises, or consists of SEQ ID NO: 264. According to some embodiments, the leader sequence comprises a nucleic acid sequence at least about 85%, 90%, 95%, 96%, 97%, 98%, 99% identical to, comprises, or consists of SEQ ID NO: 265. According to some embodiments, the leader sequence comprises a nucleic acid sequence at least about 85%, 90%, 95%, 96%, 97%, 98%, 99% identical to, comprises, or consists of SEQ ID NO: 266. According to some embodiments, the leader sequence comprises a nucleic acid sequence at least about 85%, 90%, 95%, 96%, 97%, 98%, 99% identical to, comprises, or consists of SEQ ID NO: 267. According to some embodiments, the leader sequence comprises a nucleic acid sequence at least about 85%, 90%, 95%, 96%, 97%, 98%, 99% identical to, comprises, or consists of SEQ ID NO: 268. According to some embodiments, the leader sequence comprises a nucleic acid sequence at least about 85%, 90%, 95%, 96%, 97%, 98%, 99% identical to, comprises, or consists of SEQ ID NO: 269. According to some embodiments, the leader sequence comprises a nucleic acid sequence at least about 85%, 90%, 95%, 96%, 97%, 98%, 99% identical to, comprises, or consists of SEQ ID NO: 270. According to some embodiments, the leader sequence comprises a nucleic acid sequence at least about 85%, 90%, 95%, 96%, 97%, 98%, 99% identical to, comprises, or consists of SEQ ID NO: 271. According to some embodiments, the leader sequence comprises a nucleic acid sequence at least about 85%, 90%, 95%, 96%, 97%, 98%, 99% identical to, comprises, or consists of SEQ ID NO: 272. According to some embodiments, the leader sequence comprises a nucleic acid sequence at least about 85%, 90%, 95%, 96%, 97%, 98%, 99% identical to, comprises, or consists of SEQ ID NO: 273. According to some embodiments, the leader sequence comprises a nucleic acid sequence at least about 85%, 90%, 95%, 96%, 97%, 98%, 99% identical to, comprises, or consists of SEQ ID NO: 274. According to some embodiments, the leader sequence comprises a nucleic acid sequence at least about 85%, 90%, 95%, 96%, 97%, 98%, 99% identical to, comprises, or consists of SEQ ID NO: 275. According to some embodiments, the leader sequence comprises a nucleic acid sequence at least about 85%, 90%, 95%, 96%, 97%, 98%, 99% identical to, comprises, or consists of SEQ ID NO: 276. According to some embodiments, the leader sequence comprises a nucleic acid sequence at least about 85%, 90%, 95%, 96%, 97%, 98%, 99% identical to, comprises, or consists of SEQ ID NO: 277. According to some embodiments, the leader sequence comprises a nucleic acid sequence at least about 85%, 90%, 95%, 96%, 97%, 98%, 99% identical to, comprises, or consists of SEQ ID NO: 278. According to some embodiments, the leader sequence comprises a nucleic acid sequence at least about 85%, 90%, 95%, 96%, 97%, 98%, 99% identical to, comprises, or consists of SEQ ID NO: 279. According to some embodiments, the leader sequence comprises a nucleic acid sequence at least about 85%, 90%, 95%, 96%, 97%, 98%, 99% identical to, comprises, or consists of SEQ ID NO: 280. According to some embodiments, the leader sequence comprises a nucleic acid sequence at least about 85%, 90%, 95%, 96%, 97%, 98%, 99% identical to, comprises, or consists of SEQ ID NO: 281. According to some embodiments, the leader sequence comprises a nucleic acid sequence at least about 85%, 90%, 95%, 96%, 97%, 98%, 99% identical to, comprises, or consists of SEQ ID NO: 282. According to some embodiments, the leader sequence comprises a nucleic acid sequence at least about 85%, 90%, 95%, 96%, 97%, 98%, 99% identical to, comprises, or consists of SEQ ID NO: 283.

[0484] In some embodiments, the ceDNA vector for expression of FVIII protein may comprise one or more micro RNA (MIR) sequences involved in immune responses or hepato-homestasis as shown in Table 17 below.

TABLE 17
MIR Sequences

| | | SEQ ID | |
|---|---|---|---|
| GE# | Name | NO | Description |
| GE- | mir 122_4x | 542 | micro-RNA involved in regulation |
| 699 | | | of immune reponses |
| GE- | mir- | 543 | micro-RNA involved in liver |
| 020 | 142_3pUTR | | homeostasis; Triplet repeat of mir- |
| | | | 142 binding site |

[0485] According to some embodiments, to select for specific gene targeting events, a protective shRNA may be embedded in a microRNA and inserted into a recombinant ceDNA vector designed to integrate site-specifically into the highly active locus, such as an albumin locus. Such embodiments may provide a system for in vivo selection and expansion of gene-modified hepatocytes in any genetic background such as described in Nygaard et al., A universal system to select gene-modified hepatocytes in vivo, Gene Therapy, Jun. 8, 2016. The ceDNA vectors of the present disclosure may contain one or more selectable markers that permit selection of transformed, transfected, transduced, or the like cells. A selectable marker is a gene the product of which provides for biocide or viral resistance, resistance to heavy metals, prototrophy to auxotrophs, NeoR, and the like. In certain embodiments, positive selection markers are incorporated into the donor sequences such as NeoR. Negative selections markers may be incorporated downstream the donor sequences, for example a nucleic acid sequence HSV-tk encoding a negative selection marker may be incorporated into a nucleic acid construct downstream the donor sequence.

### C. Regulatory Switches

[0486] A molecular regulatory switch is one which generates a measurable change in state in response to a signal. Such regulatory switches can be usefully combined with the ceDNA vectors for expression of FVIII protein as described herein to control the output of expression of FVIII protein from the ceDNA vector. In some embodiments, the ceDNA vector for expression of FVIII protein comprises a regulatory switch that serves to fine tune expression of the FVIII protein. For example, it can serve as a biocontainment function of the ceDNA vector. In some embodiments, the switch is an “ON/OFF” switch that is designed to start or stop (i.e., shut down) expression of FVIII protein in the ceDNA vector in a controllable and regulatable fashion. In some embodiments, the switch can include a “kill switch” that can instruct the cell comprising the ceDNA vector to undergo cell programmed death once the switch is activated. Exemplary regulatory switches encompassed for use in a ceDNA vector for expression of FVIII protein can be used to regulate the expression of a transgene, and are more fully discussed in International application PCT/US18/49996, which is incorporated herein in its entirety by reference

[0487] (i) Binary Regulatory Switches

[0488] In some embodiments, the ceDNA vector for expression of FVIII protein comprises a regulatory switch that can serve to controllably modulate expression of FVIII protein. For example, the expression cassette located between the ITRs of the ceDNA vector may additionally comprise a regulatory region, e.g., a promoter, cis-element, repressor, enhancer etc., that is operatively linked to the nucleic acid sequence encoding FVIII protein, where the regulatory region is regulated by one or more cofactors or exogenous agents. By way of example only, regulatory regions can be modulated by small molecule switches or inducible or repressible promoters. Non-limiting examples of inducible promoters are hormone-inducible or metal-inducible promoters. Other exemplary inducible promoters/enhancer elements include, but are not limited to, an RU486-inducible promoter, an ecdysone-inducible promoter, a rapamycin-inducible promoter, and a metallothionein promoter.

[0489] (ii) Small molecule Regulatory Switches

[0490] A variety of art-known small-molecule based regulatory switches are known in the art and can be combined with the ceDNA vectors for expression of FVIII protein as disclosed herein to form a regulatory-switch controlled ceDNA vector. In some embodiments, the regulatory switch can be selected from any one or a combination of: an orthogonal ligand/nuclear receptor pair, for example retinoid receptor variant/LG335 and GRQCIMFI, along with an artificial promoter controlling expression of the operatively linked transgene, such as that as disclosed in Taylor, et al. BMC Biotechnology 10 (2010): 15; engineered steroid receptors, e.g., modified progesterone receptor with a C-terminal truncation that cannot bind progesterone but binds RU486 (mifepristone) (U.S. Pat. No. 5,364,791); an ecdysone receptor from Drosophila and their ecdysteroid ligands (Saez, et al., PNAS, 97(26)(2000), 14512-14517; or a switch controlled by the antibiotic trimethoprim (TMP), as disclosed in Sando R 3^{rd}; Nat Methods. 2013, 10(11):1085-8. In some embodiments, the regulatory switch to control the transgene or expressed by the ceDNA vector is a pro-drug activation switch, such as that disclosed in U.S. Pat. Nos. 8,771,679, and 6,339,070, the contents of all of which are incorporated by reference in their entireties herein.

[0491] (iii) “Passcode” Regulatory Switches

[0492] In some embodiments the regulatory switch can be a “passcode switch” or “passcode circuit”. Passcode switches allow fine tuning of the control of the expression of the transgene from the ceDNA vector when specific conditions occur—that is, a combination of conditions need to be present for transgene expression and/or repression to occur. For example, for expression of a transgene to occur at least conditions A and B must occur. A passcode regulatory switch can be any number of conditions, e.g., at least 2, or at least 3, or at least 4, or at least 5, or at least 6 or at least 7 or more conditions to be present for transgene expression to occur. In some embodiments, at least 2 conditions (e.g., A, B conditions) need to occur, and in some embodiments, at least 3 conditions need to occur (e.g., A, B and C, or A, B and D). By way of an example only, for gene expression from a ceDNA to occur that has a passcode “ABC” regulatory switch, conditions A, B and C must be present. Conditions A, B and C could be as follows; condition A is the presence of a condition or disease, condition B is a hormonal response, and condition C is a response to the transgene expression. For example, if the transgene edits a defective EPO gene, Condition A is the presence of Chronic Kidney Disease (CKD), Condition B occurs if the subject has hypoxic conditions in the kidney, Condition C is that Erythropoietin-producing cells (EPC) recruitment in the kidney is impaired; or alternatively, HIF-2 activation is impaired. Once the oxygen levels increase or the desired level of EPO is reached, the transgene turns off again until 3 conditions occur, turning it back on.

[0493] In some embodiments, a passcode regulatory switch or “Passcode circuit” encompassed for use in the ceDNA vector comprises hybrid transcription factors (TFs) to expand the range and complexity of environmental signals used to define biocontainment conditions. As opposed to a deadman switch which triggers cell death in the presence of a predetermined condition, the “passcode circuit” allows cell survival or transgene expression in the presence of a particular “passcode”, and can be easily reprogrammed to allow transgene expression and/or cell survival only when the predetermined environmental condition or passcode is present.

[0494] Any and all combinations of regulatory switches disclosed herein, e.g., small molecule switches, nucleic acid-based switches, small molecule-nucleic acid hybrid switches, post-transcriptional transgene regulation switches, post-translational regulation, radiation-controlled switches, hypoxia-mediated switches and other regulatory switches known by persons of ordinary skill in the art as disclosed herein can be used in a passcode regulatory switch as disclosed herein. Regulatory switches encompassed for use are also discussed in the review article Kis et al., J R Soc Interface. 12: 20141000 (2015), and summarized in Table 1 of Kis, the contents of which are incorporated by reference in its entirety herein. In some embodiments, a regulatory switch for use in a passcode system can be selected from any or a combination of the switches disclosed in Table 11 of International Patent Application PCT/US18/49996, which is incorporated herein in its entirety by reference.

[0495] (iv) Nucleic Acid-Based Regulatory Switches to Control Transgene Expression

[0496] In some embodiments, the regulatory switch to control the expression of FVIII protein by the ceDNA is based on a nucleic acid based control mechanism. Exemplary nucleic acid control mechanisms are known in the art and are envisioned for use. For example, such mechanisms include riboswitches, such as those disclosed in, e.g., US2009/0305253, US2008/0269258, US2017/0204477, WO2018026762A1, U.S. Pat. No. 9,222,093 and EP application EP288071, and disclosed in the review by Villa J K et al., Microbiol Spectr. 2018 May; 6(3). Also included are metabolite-responsive transcription biosensors, such as those disclosed in WO2018/075486 and WO2017/147585. Other art-known mechanisms envisioned for use include silencing of the transgene with an siRNA or RNAi molecule (e.g., miR, shRNA). For example, the ceDNA vector can comprise a regulatory switch that encodes a RNAi molecule that is complementary to the two part of the transgene expressed by the ceDNA vector. When such RNAi is expressed even if the transgene (e.g., FVIII protein) is expressed by the ceDNA vector, it will be silenced by the complementary RNAi molecule, and when the RNAi is not expressed when the transgene is expressed by the ceDNA vector the transgene (e.g., FVIII protein) is not silenced by the RNAi.

[0497] In some embodiments, the regulatory switch is a tissue-specific self-inactivating regulatory switch, for example as disclosed in US2002/0022018, whereby the regulatory switch deliberately switches transgene (e.g., FVIII protein) off at a site where transgene expression might otherwise be disadvantageous. In some embodiments, the regulatory switch is a recombinase reversible gene expression system, for example as disclosed in US2014/0127162 and U.S. Pat. No. 8,324,436.

[0498] (v) Post-Transcriptional and Post-Translational Regulatory Switches.

[0499] In some embodiments, the regulatory switch to control the expression of FVIII protein by the ceDNA vector is a post-transcriptional modification system. For example, such a regulatory switch can be an aptazyme riboswitch that is sensitive to tetracycline or theophylline, as disclosed in US2018/0119156, GB201107768, WO2001/064956A3, EP Patent 2707487 and Beilstein et al., ACS Synth. Biol., 2015, 4 (5), pp 526-534; Zhong et al., Elife. 2016 Nov. 2; 5. pii: e18858. In some embodiments, it is envisioned that a person of ordinary skill in the art could encode both the transgene and an inhibitory siRNA which contains a ligand sensitive (OFF-switch) aptamer, the net result being a ligand sensitive ON-switch.

[0500] (vi) Other Exemplary Regulatory Switches

[0501] Any known regulatory switch can be used in the ceDNA vector to control the expression of FVIII protein by the ceDNA vector, including those triggered by environmental changes. Additional examples include, but are not limited to; the BOC method of Suzuki et al., Scientific Reports 8; 10051 (2018); genetic code expansion and a non-physiologic amino acid; radiation-controlled or ultra-sound controlled on/off switches (see, e.g., Scott S et al., Gene Ther. 2000 July; 7(13):1121-5; U.S. Pat. Nos. 5,612,318; 5,571,797; 5,770,581; 5,817,636; and WO1999/025385A1, the contents of each of which is incorporated by reference in its entirety herein). In some embodiments, the regulatory switch is controlled by an implantable system, e.g., as disclosed in U.S. Pat. No. 7,840,263; US2007/0190028A1 where gene expression is controlled by one or more forms of energy, including electromagnetic energy, that activates promoters operatively linked to the transgene in the ceDNA vector.

[0502] In some embodiments, a regulatory switch envisioned for use in the ceDNA vector is a hypoxia-mediated or stress-activated switch, e.g., such as those disclosed in WO1999060142A2, U.S. Pat. Nos. 5,834,306; 6,218,179; 6,709,858; US2015/0322410; Greco et al., (2004) Targeted Cancer Therapies 9, S368, as well as FROG, TOAD and NRSE elements and conditionally inducible silence elements, including hypoxia response elements (HREs), inflammatory response elements (IREs) and shear-stress activated elements (SSAEs), e.g., as disclosed in U.S. Pat. No. 9,394,526. Such an embodiment is useful for turning on expression of the transgene from the ceDNA vector after ischemia or in ischemic tissues, and/or tumors.

[0503] (vii) Kill Switches

[0504] Other embodiments described herein relate to a ceDNA vector for expression of FVIII protein as described herein comprising a kill switch. A kill switch as disclosed herein enables a cell comprising the ceDNA vector to be killed or undergo programmed cell death as a means to permanently remove an introduced ceDNA vector from the subject's system. It will be appreciated by one of ordinary skill in the art that use of kill switches in the ceDNA vectors for expression of FVIII protein would be typically coupled with targeting of the ceDNA vector to a limited number of cells that the subject can acceptably lose or to a cell type where apoptosis is desirable (e.g., cancer cells). In all aspects, a “kill switch” as disclosed herein is designed to provide rapid and robust cell killing of the cell comprising the ceDNA vector in the absence of an input survival signal or other specified condition. Stated another way, a kill switch encoded by a ceDNA vector for expression of FVIII protein as described herein can restrict cell survival of a cell comprising a ceDNA vector to an environment defined by specific input signals. Such kill switches serve as a biological biocontainment function should it be desirable to remove the ceDNA vector e expression of FVIII protein in a subject or to ensure that it will not express the encoded FVIII protein.

[0505] Other kill switches known to a person of ordinary skill in the art are encompassed for use in the ceDNA vector for expression of FVIII protein as disclosed herein, e.g., as disclosed in US2010/0175141; US2013/0009799; US2011/0172826; US2013/0109568, as well as kill switches disclosed in Jusiak et al., Reviews in Cell Biology and molecular Medicine; 2014; 1-56; Kobayashi et al., PNAS, 2004; 101; 8419-9; Marchisio et al., Int. Journal of Biochem and Cell Biol., 2011; 43; 310-319; and in Reinshagen et al., Science Translational Medicine, 2018, 11.

[0506] Accordingly, in some embodiments, the ceDNA vector for expression of FVIII protein can comprise a kill switch nucleic acid construct, which comprises the nucleic acid encoding an effector toxin or reporter protein, where the expression of the effector toxin (e.g., a death protein) or reporter protein is controlled by a predetermined condition. For example, a predetermined condition can be the presence of an environmental agent, such as, e.g., an exogenous agent, without which the cell will default to expression of the effector toxin (e.g., a death protein) and be killed. In alternative embodiments, a predetermined condition is the presence of two or more environmental agents, e.g., the cell will only survive when two or more necessary exogenous agents are supplied, and without either of which, the cell comprising the ceDNA vector is killed.

[0507] In some embodiments, the ceDNA vector for expression of FVIII protein is modified to incorporate a kill-switch to destroy the cells comprising the ceDNA vector to effectively terminate the in vivo expression of the transgene being expressed by the ceDNA vector (e.g., expression of FVIII protein). Specifically, the ceDNA vector is further genetically engineered to express a switch-protein that is not functional in mammalian cells under normal physiological conditions. Only upon administration of a drug or environmental condition that specifically targets this switch-protein, the cells expressing the switch-protein will be destroyed thereby terminating the expression of the therapeutic protein or peptide. For instance, it was reported that cells expressing HSV-thymidine kinase can be killed upon administration of drugs, such as ganciclovir and cytosine deaminase. See, for example, Dey and Evans, Suicide Gene Therapy by Herpes Simplex Virus-1 Thymidine Kinase (HSV-TK), in Targets in Gene Therapy, edited by You (2011); and Beltinger et al., Proc. Natl. Acad. Sci. USA 96(15):8699-8704 (1999). In some embodiments the ceDNA vector can comprise a siRNA kill switch referred to as DISE (Death Induced by Survival gene Elimination) (Murmann et al., Oncotarget. 2017; 8:84643-84658. Induction of DISE in ovarian cancer cells in vivo).

### D. Constructs

[0508] Provided herein are FVIII ceDNA contructs comprising a nucleic acid sequence as set forth in Table 1, in combination with one of more of a promoter sequence, an enhancer sequence, a 5′ UTR sequence, an intron sequence, a leader sequence, a 3′UTR sequence, a UCOE sequence, an exon sequence, a DNA nuclear targeting sequences (DTS) sequence, a Kozak sequence and/or a spacer sequence. According to some embodiments, the FVIII ceDNA construct comprises a sequence as set forth in Table 18 below.

TABLE 18
ceDNA FVIII constructs

| SEQ ID NO | ceDNA Construct Identifier |
|---|---|
| 1 | 692 |
| 2 | 693 |
| 3 | 694 |
| 4 | 933 |
| 5 | 1270 |
| 6 | 1362 |
| 7 | 1367 |
| 8 | 1368 |
| 9 | 1373 |
| 10 | 1374 |
| 11 | 1375 |
| 12 | 1377 |
| 13 | 1378 |
| 14 | 1381 |
| 15 | 1387 |
| 16 | 1391 |
| 17 | 1572 |
| 18 | 1574 |
| 19 | 1579 |
| 20 | 1582 |
| 21 | 1585 |
| 22 | 1593 |
| 23 | 1598 |
| 24 | 1602 |
| 25 | 1611 |
| 26 | 1612 |
| 27 | 1615 |
| 28 | 1616 |
| 29 | 1620 |
| 30 | 1622 |
| 31 | 1627 |
| 32 | 1628 |
| 33 | 1632 |
| 34 | 1636 |
| 35 | 1637 |
| 36 | 1638 |
| 37 | 1645 |
| 38 | 1646 |
| 39 | 1647 |
| 40 | 1648 |
| 41 | 1649 |
| 42 | 1651 |
| 43 | 1652 |
| 44 | 1655 |
| 45 | 1657 |
| 46 | 1664 |
| 47 | 1668 |
| 48 | 1695 |
| 49 | 1700 |
| 50 | 1701 |
| 51 | 1708 |
| 52 | 1712 |
| 53 | 1725 |
| 54 | 1738 |
| 55 | 1740 |
| 56 | 1741 |
| 57 | 1742 |
| 58 | 1743 |
| 59 | 1744 |
| 60 | 1838 |
| 61 | 1840 |
| 62 | 1886 |
| 63 | 1918 |
| 64 | 1919 |
| 65 | 1920 |
| 66 | 1921 |
| 67 | 1922 |
| 68 | 1923 |
| 69 | 1930 |
| 70 | 1931 |
| 442 | 1658 |
| 443 | 1666 |
| 444 | 1880 |
| 445 | 1885 |
| 446 | 1948 |
| 447 | 1949 |
| 448 | 1950 |
| 449 | ceDNA fusion 1476::1923ORF |
| 450 | ceDNA fusion 1477::1923ORF |
| 451 | ceDNA fusion 1478::1923ORF |
| 452 | ceDNA fusion 1479::1923ORF |
| 453 | ceDNA fusion 1480::1923ORF |
| 454 | ceDNA fusion 1649::3xG-1923ORF |
| 455 | ceDNA fusion 1649::3xG-Min-Con-1923ORF |
| 456 | ceDNA fusion |
| | 1649::3xG-mod-Con-1923ORF |
| 457 | ceDNA fusion 1649::325243-1923ORF |
| 458 | ceDNA fusion 1649::Min-Con-1923ORF |
| 459 | ceDNA fusion |
| | 1668::3xG-Mod-Con-1923ORF |
| 460 | ceDNA fusion 1668::1923ORF |
| 461 | ceDNA fusion 1668::Mod-Con-1923ORF |
| 462 | ceDNA fusion 1471::1923ORF |
| 463 | ceDNA fusion 1471::con-1923ORF |
| 464 | ceDNA fusion 1472::1923ORF |
| 465 | ceDNA fusion 1472::Con-1923ORF |
| 466 | ceDNA fusion 1473::1923ORF |
| 467 | ceDNA fusion 1473::Con-1923ORF |
| 468 | ceDNA fusion 1474::1923ORF |
| 469 | ceDNA fusion 1474::Con-1923ORF |
| 470 | ceDNA fusion 1475::1923ORF |
| 471 | ceDNA fusion 1622::1923ORF |
| 472 | ceDNA fusion 1627::1923ORF |
| 473 | ceDNA fusion 1628::1923ORF |
| 474 | ceDNA fusion 1632::1923 ORF |
| 475 | ceDNA fusion 1636::1923ORF |
| 476 | ceDNA fusion 1637::1923ORF |
| 477 | ceDNA fusion 1637::Con-1923ORF |
| 478 | ceDNA fusion 1638::1923ORF |
| 479 | ceDNA fusion 1645::1923ORF |
| 480 | ceDNA Fusion 1646::1923ORF |
| 481 | ceDNA Fusion 1649::1923ORF |
| 482 | ceDNA Fusion 1649::mod-Con-1923ORF |
| 483 | 1719 |
| 642 | ceDNA construct 10 (3x hSerpEnh VD, 1651) |
| 643 | ceDNA construct 60 (w/3x |
| | hSerpEnh_2mer_spacers_v17) |
| 644 | ceDNA construct 61 (w/3x |
| | hSerpEnh_11mer_spacers_v3) |
| 645 | ceDNA construct 62 (w/3x Bushbaby |
| | SerpEnh_Aspacers) |
| 646 | ceDNA construct 39 (wild-type left ITR and |
| | right ITR truncation) |

[0509] According to some embodiments, a ceDNA construct comprises a nucleic acid sequence at least about 85%, 90%, 95%, 96%, 97%, 98%, 99% identical to SEQ ID NO: 1. According to some embodiments, the ceDNA construct comprises, or consists of SEQ ID NO: 1. According to some embodiments, a ceDNA construct comprises a nucleic acid sequence at least about 85%, 90%, 95%, 96%, 97%, 98%, 99% identical to SEQ ID NO: 2. According to some embodiments, the ceDNA construct comprises, or consists of SEQ ID NO: 2. According to some embodiments, a ceDNA construct comprises a nucleic acid sequence at least about 85%, 90%, 95%, 96%, 97%, 98%, 99% identical to SEQ ID NO: 3. According to some embodiments, the ceDNA construct comprises, or consists of SEQ ID NO: 3. According to some embodiments, a ceDNA construct comprises a nucleic acid sequence at least about 85%, 90%, 95%, 96%, 97%, 98%, 99% identical to SEQ ID NO: 4. According to some embodiments, the ceDNA construct comprises, or consists of SEQ ID NO: 4. According to some embodiments, a ceDNA construct comprises a nucleic acid sequence at least about 85%, 90%, 95%, 96%, 97%, 98%, 99% identical to SEQ ID NO: 5. According to some embodiments, the ceDNA construct comprises, or consists of SEQ ID NO: 5. According to some embodiments, a ceDNA construct comprises a nucleic acid sequence at least about 85%, 90%, 95%, 96%, 97%, 98%, 99% identical to SEQ ID NO: 6. According to some embodiments, the ceDNA construct comprises, or consists of SEQ ID NO: 6. According to some embodiments, a ceDNA construct comprises a nucleic acid sequence at least about 85%, 90%, 95%, 96%, 97%, 98%, 99% identical to SEQ ID NO: 7. According to some embodiments, the ceDNA construct comprises, or consists of SEQ ID NO: 7. According to some embodiments, a ceDNA construct comprises a nucleic acid sequence at least about 85%, 90%, 95%, 96%, 97%, 98%, 99% identical to SEQ ID NO:8. According to some embodiments, the ceDNA construct comprises, or consists of SEQ ID NO: 8. According to some embodiments, a ceDNA construct comprises a nucleic acid sequence at least about 85%, 90%, 95%, 96%, 97%, 98%, 99% identical to SEQ ID NO: 9. According to some embodiments, the ceDNA construct comprises, or consists of SEQ ID NO: 9. According to some embodiments, a ceDNA construct comprises a nucleic acid sequence at least about 85%, 90%, 95%, 96%, 97%, 98%, 99% identical to SEQ ID NO: 10. According to some embodiments, the ceDNA construct comprises, or consists of SEQ ID NO: 10. According to some embodiments, a ceDNA construct comprises a nucleic acid sequence at least about 85%, 90%, 95%, 96%, 97%, 98%, 99% identical to SEQ ID NO: 11. According to some embodiments, the ceDNA construct comprises, or consists of SEQ ID NO: 11. According to some embodiments, a ceDNA construct comprises a nucleic acid sequence at least about 85%, 90%, 95%, 96%, 97%, 98%, 99% identical to SEQ ID NO: 12. According to some embodiments, the ceDNA construct comprises, or consists of SEQ ID NO: 12. According to some embodiments, a ceDNA construct comprises a nucleic acid sequence at least about 85%, 90%, 95%, 96%, 97%, 98%, 99% identical to SEQ ID NO: 13. According to some embodiments, the ceDNA construct comprises, or consists of SEQ ID NO: 13. According to some embodiments, a ceDNA construct comprises a nucleic acid sequence at least about 85%, 90%, 95%, 96%, 97%, 98%, 99% identical to SEQ ID NO: 14. According to some embodiments, the ceDNA construct comprises, or consists of SEQ ID NO: 14. According to some embodiments, a ceDNA construct comprises a nucleic acid sequence at least about 85%, 90%, 95%, 96%, 97%, 98%, 99% identical to SEQ ID NO: 15. According to some embodiments, the ceDNA construct comprises, or consists of SEQ ID NO: 15. According to some embodiments, a ceDNA construct comprises a nucleic acid sequence at least about 85%, 90%, 95%, 96%, 97%, 98%, 99% identical to SEQ ID NO: 16. According to some embodiments, the ceDNA construct comprises, or consists of SEQ ID NO: 16. According to some embodiments, a ceDNA construct comprises a nucleic acid sequence at least about 85%, 90%, 95%, 96%, 97%, 98%, 99% identical to SEQ ID NO: 17. According to some embodiments, the ceDNA construct comprises, or consists of SEQ ID NO: 17. According to some embodiments, a ceDNA construct comprises a nucleic acid sequence at least about 85%, 90%, 95%, 96%, 97%, 98%, 99% identical to SEQ ID NO: 18. According to some embodiments, the ceDNA construct comprises, or consists of SEQ ID NO: 18. According to some embodiments, a ceDNA construct comprises a nucleic acid sequence at least about 85%, 90%, 95%, 96%, 97%, 98%, 99% identical to SEQ ID NO: 19. According to some embodiments, the ceDNA construct comprises, or consists of SEQ ID NO: 19. According to some embodiments, a ceDNA construct comprises a nucleic acid sequence at least about 85%, 90%, 95%, 96%, 97%, 98%, 99% identical to SEQ ID NO: 20. According to some embodiments, the ceDNA construct comprises, or consists of SEQ ID NO: 20. According to some embodiments, a ceDNA construct comprises a nucleic acid sequence at least about 85%, 90%, 95%, 96%, 97%, 98%, 99% identical to SEQ ID NO: 21. According to some embodiments, the ceDNA construct comprises, or consists of SEQ ID NO: 21. According to some embodiments, a ceDNA construct comprises a nucleic acid sequence at least about 85%, 90%, 95%, 96%, 97%, 98%, 99% identical to SEQ ID NO: 22. According to some embodiments, the ceDNA construct comprises, or consists of SEQ ID NO: 22. According to some embodiments, a ceDNA construct comprises a nucleic acid sequence at least about 85%, 90%, 95%, 96%, 97%, 98%, 99% identical to SEQ ID NO: 23. According to some embodiments, the ceDNA construct comprises, or consists of SEQ ID NO: 23. According to some embodiments, a ceDNA construct comprises a nucleic acid sequence at least about 85%, 90%, 95%, 96%, 97%, 98%, 99% identical to SEQ ID NO: 24. According to some embodiments, the ceDNA construct comprises, or consists of SEQ ID NO: 24. According to some embodiments, a ceDNA construct comprises a nucleic acid sequence at least about 85%, 90%, 95%, 96%, 97%, 98%, 99% identical to SEQ ID NO: 25. According to some embodiments, the ceDNA construct comprises, or consists of SEQ ID NO: 25. According to some embodiments, a ceDNA construct comprises a nucleic acid sequence at least about 85%, 90%, 95%, 96%, 97%, 98%, 99% identical to SEQ ID NO: 26. According to some embodiments, the ceDNA construct comprises, or consists of SEQ ID NO: 26. According to some embodiments, a ceDNA construct comprises a nucleic acid sequence at least about 85%, 90%, 95%, 96%, 97%, 98%, 99% identical to SEQ ID NO: 27. According to some embodiments, the ceDNA construct comprises, or consists of SEQ ID NO: 7. According to some embodiments, a ceDNA construct comprises a nucleic acid sequence at least about 85%, 90%, 95%, 96%, 97%, 98%, 99% identical to, comprises, or consists of SEQ ID NO:28. According to some embodiments, the ceDNA construct consists of SEQ ID NO: 28. According to some embodiments, a ceDNA construct comprises a nucleic acid sequence at least about 85%, 90%, 95%, 96%, 97%, 98%, 99% identical to, comprises, or consists of SEQ ID NO: 29. According to some embodiments, the ceDNA construct consists of SEQ ID NO: 29. According to some embodiments, a ceDNA construct comprises a nucleic acid sequence at least about 85%, 90%, 95%, 96%, 97%, 98%, 99% identical to, comprises, or consists of SEQ ID NO: 30. According to some embodiments, the ceDNA construct consists of SEQ ID NO: 30. According to some embodiments, a ceDNA construct comprises a nucleic acid sequence at least about 85%, 90%, 95%, 96%, 97%, 98%, 99% identical to, comprises, or consists of SEQ ID NO: 31. According to some embodiments, the ceDNA construct consists of SEQ ID NO: 31. According to some embodiments, a ceDNA construct comprises a nucleic acid sequence at least about 85%, 90%, 95%, 96%, 97%, 98%, 99% identical to, comprises, or consists of SEQ ID NO: 32. According to some embodiments, the ceDNA construct consists of SEQ ID NO: 32. According to some embodiments, a ceDNA construct comprises a nucleic acid sequence at least about 85%, 90%, 95%, 96%, 97%, 98%, 99% identical to, comprises, or consists of SEQ ID NO: 33. According to some embodiments, the ceDNA construct consists of SEQ ID NO: 33. According to some embodiments, a ceDNA construct comprises a nucleic acid sequence at least about 85%, 90%, 95%, 96%, 97%, 98%, 99% identical to, comprises, or consists of SEQ ID NO: 34. According to some embodiments, the ceDNA construct consists of SEQ ID NO: 34. According to some embodiments, a ceDNA construct comprises a nucleic acid sequence at least about 85%, 90%, 95%, 96%, 97%, 98%, 99% identical to, comprises, or consists of SEQ ID NO: 35. According to some embodiments, the ceDNA construct consists of SEQ ID NO: 35. According to some embodiments, a ceDNA construct comprises a nucleic acid sequence at least about 85%, 90%, 95%, 96%, 97%, 98%, 99% identical to, comprises, or consists of SEQ ID NO: 36. According to some embodiments, the ceDNA construct consists of SEQ ID NO: 36. According to some embodiments, a ceDNA construct comprises a nucleic acid sequence at least about 85%, 90%, 95%, 96%, 97%, 98%, 99% identical to, comprises, or consists of SEQ ID NO: 37. According to some embodiments, the ceDNA construct consists of SEQ ID NO: 37. According to some embodiments, a ceDNA construct comprises a nucleic acid sequence at least about 85%, 90%, 95%, 96%, 97%, 98%, 99% identical to, comprises, or consists of SEQ ID NO: 38. According to some embodiments, the ceDNA construct consists of SEQ ID NO: 38. According to some embodiments, a ceDNA construct comprises a nucleic acid sequence at least about 85%, 90%, 95%, 96%, 97%, 98%, 99% identical to, comprises, or consists of SEQ ID NO: 39. According to some embodiments, the ceDNA construct consists of SEQ ID NO: 39. According to some embodiments, a ceDNA construct comprises a nucleic acid sequence at least about 85%, 90%, 95%, 96%, 97%, 98%, 99% identical to, comprises, or consists of SEQ ID NO: 40. According to some embodiments, the ceDNA construct consists of SEQ ID NO: 40. According to some embodiments, a ceDNA construct comprises a nucleic acid sequence at least about 85%, 90%, 95%, 96%, 97%, 98%, 99% identical to, comprises, or consists of SEQ ID NO: 41. According to some embodiments, the ceDNA construct consists of SEQ ID NO: 41. According to some embodiments, a ceDNA construct comprises a nucleic acid sequence at least about 85%, 90%, 95%, 96%, 97%, 98%, 99% identical to, comprises, or consists of SEQ ID NO: 42. According to some embodiments, the ceDNA construct consists of SEQ ID NO: 42. According to some embodiments, a ceDNA construct comprises a nucleic acid sequence at least about 85%, 90%, 95%, 96%, 97%, 98%, 99% identical to, comprises, or consists of SEQ ID NO: 43. According to some embodiments, the ceDNA construct consists of SEQ ID NO: 43. According to some embodiments, a ceDNA construct comprises a nucleic acid sequence at least about 85%, 90%, 95%, 96%, 97%, 98%, 99% identical to, comprises, or consists of SEQ ID NO: 44. According to some embodiments, the ceDNA construct consists of SEQ ID NO: 44. According to some embodiments, a ceDNA construct comprises a nucleic acid sequence at least about 85%, 90%, 95%, 96%, 97%, 98%, 99% identical to, comprises, or consists of SEQ ID NO: 45. According to some embodiments, the ceDNA construct consists of SEQ ID NO: 45. According to some embodiments, a ceDNA construct comprises a nucleic acid sequence at least about 85%, 90%, 95%, 96%, 97%, 98%, 99% identical to, comprises, or consists of SEQ ID NO: 46. According to some embodiments, the ceDNA construct consists of SEQ ID NO: 46. According to some embodiments, a ceDNA construct comprises a nucleic acid sequence at least about 85%, 90%, 95%, 96%, 97%, 98%, 99% identical to, comprises, or consists of SEQ ID NO: 47. According to some embodiments, the ceDNA construct consists of SEQ ID NO: 47. According to some embodiments, a ceDNA construct comprises a nucleic acid sequence at least about 85%, 90%, 95%, 96%, 97%, 98%, 99% identical to, comprises, or consists of SEQ ID NO: 48. According to some embodiments, the ceDNA construct consists of SEQ ID NO: 48. According to some embodiments, a ceDNA construct comprises a nucleic acid sequence at least about 85%, 90%, 95%, 96%, 97%, 98%, 99% identical to, comprises, or consists of SEQ ID NO: 49. According to some embodiments, the ceDNA construct consists of SEQ ID NO: 49. According to some embodiments, a ceDNA construct comprises a nucleic acid sequence at least about 85%, 90%, 95%, 96%, 97%, 98%, 99% identical to, comprises, or consists of SEQ ID NO: 50. According to some embodiments, the ceDNA construct consists of SEQ ID NO: 50. According to some embodiments, a ceDNA construct comprises a nucleic acid sequence at least about 85%, 90%, 95%, 96%, 97%, 98%, 99% identical to, comprises, or consists of SEQ ID NO: 51. According to some embodiments, the ceDNA construct consists of SEQ ID NO: 51. According to some embodiments, a ceDNA construct comprises a nucleic acid sequence at least about 85%, 90%, 95%, 96%, 97%, 98%, 99% identical to, comprises, or consists of SEQ ID NO: 52. According to some embodiments, the ceDNA construct consists of SEQ ID NO: 52. According to some embodiments, a ceDNA construct comprises a nucleic acid sequence at least about 85%, 90%, 95%, 96%, 97%, 98%, 99% identical to, comprises, or consists of SEQ ID NO: 53. According to some embodiments, the ceDNA construct consists of SEQ ID NO: 53. According to some embodiments, a ceDNA construct comprises a nucleic acid sequence at least about 85%, 90%, 95%, 96%, 97%, 98%, 99% identical to, comprises, or consists of SEQ ID NO: 54. According to some embodiments, the ceDNA construct consists of SEQ ID NO: 54. According to some embodiments, a ceDNA construct comprises a nucleic acid sequence at least about 85%, 90%, 95%, 96%, 97%, 98%, 99% identical to, comprises, or consists of SEQ ID NO: 55. According to some embodiments, the ceDNA construct consists of SEQ ID NO: 55. According to some embodiments, a ceDNA construct comprises a nucleic acid sequence at least about 85%, 90%, 95%, 96%, 97%, 98%, 99% identical to, comprises, or consists of SEQ ID NO: 56. According to some embodiments, the ceDNA construct consists of SEQ ID NO: 56. According to some embodiments, a ceDNA construct comprises a nucleic acid sequence at least about 85%, 90%, 95%, 96%, 97%, 98%, 99% identical to, comprises, or consists of SEQ ID NO: 57. According to some embodiments, the ceDNA construct consists of SEQ ID NO: 57. According to some embodiments, a ceDNA construct comprises a nucleic acid sequence at least about 85%, 90%, 95%, 96%, 97%, 98%, 99% identical to, comprises, or consists of SEQ ID NO: 58. According to some embodiments, the ceDNA construct consists of SEQ ID NO: 58. According to some embodiments, a ceDNA construct comprises a nucleic acid sequence at least about 85%, 90%, 95%, 96%, 97%, 98%, 99% identical to, comprises, or consists of SEQ ID NO: 59. According to some embodiments, the ceDNA construct consists of SEQ ID NO: 59. According to some embodiments, a ceDNA construct comprises a nucleic acid sequence at least about 85%, 90%, 95%, 96%, 97%, 98%, 99% identical to, or comprises SEQ ID NO: 60. According to some embodiments, the ceDNA construct consists of SEQ ID NO: 60. According to some embodiments, a ceDNA construct comprises a nucleic acid sequence at least about 85%, 90%, 95%, 96%, 97%, 98%, 99% identical to, or comprises SEQ ID NO: 61. According to some embodiments, the ceDNA construct consists of SEQ ID NO: 61. According to some embodiments, a ceDNA construct comprises a nucleic acid sequence at least about 85%, 90%, 95%, 96%, 97%, 98%, 99% identical to, or comprises SEQ ID NO: 62. According to some embodiments, the ceDNA construct consists of SEQ ID NO: 62. According to some embodiments, a ceDNA construct comprises a nucleic acid sequence at least about 85%, 90%, 95%, 96%, 97%, 98%, 99% identical to, or comprises SEQ ID NO: 63. According to some embodiments, the ceDNA construct consists of SEQ ID NO: 63. According to some embodiments, a ceDNA construct comprises a nucleic acid sequence at least about 85%, 90%, 95%, 96%, 97%, 98%, 99% identical to, or comprises SEQ ID NO: 64. According to some embodiments, the ceDNA construct consists of SEQ ID NO: 64. According to some embodiments, a ceDNA construct comprises a nucleic acid sequence at least about 85%, 90%, 95%, 96%, 97%, 98%, 99% identical to, or comprises SEQ ID NO: 65. According to some embodiments, the ceDNA construct consists of SEQ ID NO: 65. According to some embodiments, a ceDNA construct comprises a nucleic acid sequence at least about 85%, 90%, 95%, 96%, 97%, 98%, 99% identical to, or comprises SEQ ID NO: 66. According to some embodiments, the ceDNA construct consists of SEQ ID NO: 66. According to some embodiments, a ceDNA construct comprises a nucleic acid sequence at least about 85%, 90%, 95%, 96%, 97%, 98%, 99% identical to, or comprises SEQ ID NO: 67. According to some embodiments, the ceDNA construct consists of SEQ ID NO: 67. According to some embodiments, a ceDNA construct comprises a nucleic acid sequence at least about 85%, 90%, 95%, 96%, 97%, 98%, 99% identical to, or comprises SEQ ID NO: 68. According to some embodiments, the ceDNA construct consists of SEQ ID NO: 68. According to some embodiments, a ceDNA construct comprises a nucleic acid sequence at least about 85%, 90%, 95%, 96%, 97%, 98%, 99% identical to, or comprises SEQ ID NO: 69. According to some embodiments, the ceDNA construct consists of SEQ ID NO: 69. According to some embodiments, a ceDNA construct comprises a nucleic acid sequence at least about 85%, 90%, 95%, 96%, 97%, 98%, 99% identical to, or comprises SEQ ID NO: 70. According to some embodiments, the ceDNA construct consists of SEQ ID NO: 70. According to some embodiments, a ceDNA construct comprises a nucleic acid sequence at least about 85%, 90%, 95%, 96%, 97%, 98%, 99% identical to, or comprises SEQ ID NO: 442. According to some embodiments, the ceDNA construct consists of SEQ ID NO: 442. According to some embodiments, a ceDNA construct comprises a nucleic acid sequence at least about 85%, 90%, 95%, 96%, 97%, 98%, 99% identical to, or comprises SEQ ID NO: 443. According to some embodiments, the ceDNA construct consists of SEQ ID NO: 443. According to some embodiments, a ceDNA construct comprises a nucleic acid sequence at least about 85%, 90%, 95%, 96%, 97%, 98%, 99% identical to, or comprises SEQ ID NO: 444. According to some embodiments, the ceDNA construct consists of SEQ ID NO: 444. According to some embodiments, a ceDNA construct comprises a nucleic acid sequence at least about 85%, 90%, 95%, 96%, 97%, 98%, 99% identical to, or comprises SEQ ID NO: 445. According to some embodiments, the ceDNA construct consists of SEQ ID NO: 445. According to some embodiments, a ceDNA construct comprises a nucleic acid sequence at least about 85%, 90%, 95%, 96%, 97%, 98%, 99% identical to, or comprises SEQ ID NO: 446. According to some embodiments, the ceDNA construct consists of SEQ ID NO: 446. According to some embodiments, a ceDNA construct comprises a nucleic acid sequence at least about 85%, 90%, 95%, 96%, 97%, 98%, 99% identical to, or comprises SEQ ID NO: 447. According to some embodiments, the ceDNA construct consists of SEQ ID NO: 447. According to some embodiments, a ceDNA construct comprises a nucleic acid sequence at least about 85%, 90%, 95%, 96%, 97%, 98%, 99% identical to, or comprises SEQ ID NO: 448. According to some embodiments, the ceDNA construct consists of SEQ ID NO: 448. According to some embodiments, a ceDNA construct comprises a nucleic acid sequence at least about 85%, 90%, 95%, 96%, 97%, 98%, 99% identical to, or comprises SEQ ID NO: 449. According to some embodiments, the ceDNA construct consists of SEQ ID NO: 449. According to some embodiments, a ceDNA construct comprises a nucleic acid sequence at least about 85%, 90%, 95%, 96%, 97%, 98%, 99% identical to, or comprises SEQ ID NO: 450. According to some embodiments, the ceDNA construct consists of SEQ ID NO: 450. According to some embodiments, a ceDNA construct comprises a nucleic acid sequence at least about 85%, 90%, 95%, 96%, 97%, 98%, 99% identical to, or comprises SEQ ID NO: 451. According to some embodiments, the ceDNA construct consists of SEQ ID NO: 451. According to some embodiments, a ceDNA construct comprises a nucleic acid sequence at least about 85%, 90%, 95%, 96%, 97%, 98%, 99% identical to, or comprises SEQ ID NO: 452. According to some embodiments, the ceDNA construct consists of SEQ ID NO: 452. According to some embodiments, a ceDNA construct comprises a nucleic acid sequence at least about 85%, 90%, 95%, 96%, 97%, 98%, 99% identical to, or comprises SEQ ID NO: 453. According to some embodiments, the ceDNA construct consists of SEQ ID NO: 453. According to some embodiments, a ceDNA construct comprises a nucleic acid sequence at least about 85%, 90%, 95%, 96%, 97%, 98%, 99% identical to, or comprises SEQ ID NO: 454. According to some embodiments, the ceDNA construct consists of SEQ ID NO: 454. According to some embodiments, a ceDNA construct comprises a nucleic acid sequence at least about 85%, 90%, 95%, 96%, 97%, 98%, 99% identical to, or comprises SEQ ID NO: 455. According to some embodiments, the ceDNA construct consists of SEQ ID NO: 455. According to some embodiments, a ceDNA construct comprises a nucleic acid sequence at least about 85%, 90%, 95%, 96%, 97%, 98%, 99% identical to, or comprises SEQ ID NO: 456. According to some embodiments, the ceDNA construct consists of SEQ ID NO: 456. According to some embodiments, a ceDNA construct comprises a nucleic acid sequence at least about 85%, 90%, 95%, 96%, 97%, 98%, 99% identical to, or comprises SEQ ID NO: 457. According to some embodiments, the ceDNA construct consists of SEQ ID NO: 457. According to some embodiments, a ceDNA construct comprises a nucleic acid sequence at least about 85%, 90%, 95%, 96%, 97%, 98%, 99% identical to, or comprises SEQ ID NO: 458. According to some embodiments, the ceDNA construct consists of SEQ ID NO: 458. According to some embodiments, a ceDNA construct comprises a nucleic acid sequence at least about 85%, 90%, 95%, 96%, 97%, 98%, 99% identical to, or comprises SEQ ID NO: 459. According to some embodiments, the ceDNA construct consists of SEQ ID NO: 459. According to some embodiments, a ceDNA construct comprises a nucleic acid sequence at least about 85%, 90%, 95%, 96%, 97%, 98%, 99% identical to, or comprises SEQ ID NO: 460. According to some embodiments, the ceDNA construct consists of SEQ ID NO: 460. According to some embodiments, a ceDNA construct comprises a nucleic acid sequence at least about 85%, 90%, 95%, 96%, 97%, 98%, 99% identical to, or comprises SEQ ID NO: 461. According to some embodiments, the ceDNA construct consists of SEQ ID NO: 461. According to some embodiments, a ceDNA construct comprises a nucleic acid sequence at least about 85%, 90%, 95%, 96%, 97%, 98%, 99% identical to, or comprises SEQ ID NO: 462. According to some embodiments, the ceDNA construct consists of SEQ ID NO: 462. According to some embodiments, a ceDNA construct comprises a nucleic acid sequence at least about 85%, 90%, 95%, 96%, 97%, 98%, 99% identical to, or comprises SEQ ID NO: 463. According to some embodiments, the ceDNA construct consists of SEQ ID NO: 463. According to some embodiments, a ceDNA construct comprises a nucleic acid sequence at least about 85%, 90%, 95%, 96%, 97%, 98%, 99% identical to, or comprises SEQ ID NO: 464. According to some embodiments, the ceDNA construct consists of SEQ ID NO: 464. According to some embodiments, a ceDNA construct comprises a nucleic acid sequence at least about 85%, 90%, 95%, 96%, 97%, 98%, 99% identical to, or comprises SEQ ID NO: 465. According to some embodiments, the ceDNA construct consists of SEQ ID NO: 465. According to some embodiments, a ceDNA construct comprises a nucleic acid sequence at least about 85%, 90%, 95%, 96%, 97%, 98%, 99% identical to, or comprises SEQ ID NO: 466. According to some embodiments, the ceDNA construct consists of SEQ ID NO: 466. According to some embodiments, a ceDNA construct comprises a nucleic acid sequence at least about 85%, 90%, 95%, 96%, 97%, 98%, 99% identical to, or comprises SEQ ID NO: 467. According to some embodiments, the ceDNA construct consists of SEQ ID NO: 467. According to some embodiments, a ceDNA construct comprises a nucleic acid sequence at least about 85%, 90%, 95%, 96%, 97%, 98%, 99% identical to, or comprises SEQ ID NO: 468. According to some embodiments, the ceDNA construct consists of SEQ ID NO: 468. According to some embodiments, a ceDNA construct comprises a nucleic acid sequence at least about 85%, 90%, 95%, 96%, 97%, 98%, 99% identical to, or comprises SEQ ID NO: 469. According to some embodiments, the ceDNA construct consists of SEQ ID NO: 469. According to some embodiments, a ceDNA construct comprises a nucleic acid sequence at least about 85%, 90%, 95%, 96%, 97%, 98%, 99% identical to, or comprises SEQ ID NO: 470. According to some embodiments, the ceDNA construct consists of SEQ ID NO: 470. According to some embodiments, a ceDNA construct comprises a nucleic acid sequence at least about 85%, 90%, 95%, 96%, 97%, 98%, 99% identical to, or comprises SEQ ID NO: 471. According to some embodiments, the ceDNA construct consists of SEQ ID NO: 471. According to some embodiments, a ceDNA construct comprises a nucleic acid sequence at least about 85%, 90%, 95%, 96%, 97%, 98%, 99% identical to, or comprises SEQ ID NO: 472. According to some embodiments, the ceDNA construct consists of SEQ ID NO: 472. According to some embodiments, a ceDNA construct comprises a nucleic acid sequence at least about 85%, 90%, 95%, 96%, 97%, 98%, 99% identical to, or comprises SEQ ID NO: 473. According to some embodiments, the ceDNA construct consists of SEQ ID NO: 473. According to some embodiments, a ceDNA construct comprises a nucleic acid sequence at least about 85%, 90%, 95%, 96%, 97%, 98%, 99% identical to, or comprises SEQ ID NO: 474. According to some embodiments, the ceDNA construct consists of SEQ ID NO: 474. According to some embodiments, a ceDNA construct comprises a nucleic acid sequence at least about 85%, 90%, 95%, 96%, 97%, 98%, 99% identical to, or comprises SEQ ID NO: 475. According to some embodiments, the ceDNA construct consists of SEQ ID NO: 475. According to some embodiments, a ceDNA construct comprises a nucleic acid sequence at least about 85%, 90%, 95%, 96%, 97%, 98%, 99% identical to, or comprises SEQ ID NO: 476. According to some embodiments, the ceDNA construct consists of SEQ ID NO: 476. According to some embodiments, a ceDNA construct comprises a nucleic acid sequence at least about 85%, 90%, 95%, 96%, 97%, 98%, 99% identical to, or comprises SEQ ID NO: 477. According to some embodiments, the ceDNA construct consists of SEQ ID NO: 477. According to some embodiments, a ceDNA construct comprises a nucleic acid sequence at least about 85%, 90%, 95%, 96%, 97%, 98%, 99% identical to, or comprises SEQ ID NO: 478. According to some embodiments, the ceDNA construct consists of SEQ ID NO: 478. According to some embodiments, a ceDNA construct comprises a nucleic acid sequence at least about 85%, 90%, 95%, 96%, 97%, 98%, 99% identical to, or comprises SEQ ID NO: 479. According to some embodiments, the ceDNA construct consists of SEQ ID NO: 479. According to some embodiments, a ceDNA construct comprises a nucleic acid sequence at least about 85%, 90%, 95%, 96%, 97%, 98%, 99% identical to, or comprises SEQ ID NO: 480. According to some embodiments, the ceDNA construct consists of SEQ ID NO: 480. According to some embodiments, a ceDNA construct comprises a nucleic acid sequence at least about 85%, 90%, 95%, 96%, 97%, 98%, 99% identical to, or comprises SEQ ID NO: 481. According to some embodiments, the ceDNA construct consists of SEQ ID NO: 481. According to some embodiments, a ceDNA construct comprises a nucleic acid sequence at least about 85%, 90%, 95%, 96%, 97%, 98%, 99% identical to, or comprises SEQ ID NO: 482. According to some embodiments, the ceDNA construct consists of SEQ ID NO: 482. According to some embodiments, a ceDNA construct comprises a nucleic acid sequence at least about 85%, 90%, 95%, 96%, 97%, 98%, 99% identical to, or comprises, SEQ ID NO: 483. According to some embodiments, the ceDNA construct consists of SEQ ID NO: 483. According to some embodiments, a ceDNA construct comprises a nucleic acid sequence at least about 85%, 90%, 95%, 96%, 97%, 98%, 99% identical to, or comprises, SEQ ID NO: 642. According to some embodiments, the ceDNA construct consists of SEQ ID NO: 642. According to some embodiments, a ceDNA construct comprises a nucleic acid sequence at least about 85%, 90%, 95%, 96%, 97%, 98%, 99% identical to, or comprises, SEQ ID NO: 643. According to some embodiments, the ceDNA construct consists of SEQ ID NO: 643. According to some embodiments, a ceDNA construct comprises a nucleic acid sequence at least about 85%, 90%, 95%, 96%, 97%, 98%, 99% identical to, or comprises, SEQ ID NO: 644. According to some embodiments, the ceDNA construct consists of SEQ ID NO: 644. According to some embodiments, a ceDNA construct comprises a nucleic acid sequence at least about 85%, 90%, 95%, 96%, 97%, 98%, 99% identical to, or comprises, SEQ ID NO: 645. According to some embodiments, the ceDNA construct consists of SEQ ID NO: 645. According to some embodiments, a ceDNA construct comprises a nucleic acid sequence at least about 85%, 90%, 95%, 96%, 97%, 98%, 99% identical to, or comprises, SEQ ID NO: 646. According to some embodiments, the ceDNA construct consists of SEQ ID NO: 646.

### VI. Detailed Method of Production of a ceDNA Vector

### A. Production in General

[0510] Certain methods for the production of a ceDNA vector for expression of FVIII protein comprising an asymmetrical ITR pair or symmetrical ITR pair as defined herein is described in section IV of International application PCT/US18/49996 filed Sep. 7, 2018, which is incorporated herein in its entirety by reference. In some embodiments, a ceDNA vector for expression of FVIII protein as disclosed herein can be produced using insect cells, as described herein. In alternative embodiments, a ceDNA vector for expression of FVIII protein as disclosed herein can be produced synthetically and in some embodiments, in a cell-free method, as disclosed on International Application PCT/US19/14122, filed Jan. 18, 2019, which is incorporated herein in its entirety by reference.

[0511] As described herein, in one embodiment, a ceDNA vector for expression of FVIII protein can be obtained, for example, by the process comprising the steps of: a) incubating a population of host cells (e.g., insect cells) harboring the polynucleotide expression construct template (e.g., a ceDNA-plasmid, a ceDNA-Bacmid, and/or a ceDNA-baculovirus), which is devoid of viral capsid coding sequences, in the presence of a Rep protein under conditions effective and for a time sufficient to induce production of the ceDNA vector within the host cells, and wherein the host cells do not comprise viral capsid coding sequences; and b) harvesting and isolating the ceDNA vector from the host cells. The presence of Rep protein induces replication of the vector polynucleotide with a modified ITR to produce the ceDNA vector in a host cell. However, no viral particles (e.g., AAV virions) are expressed. Thus, there is no size limitation such as that naturally imposed in AAV or other viral-based vectors.

[0512] The presence of the ceDNA vector isolated from the host cells can be confirmed by digesting DNA isolated from the host cell with a restriction enzyme having a single recognition site on the ceDNA vector and analyzing the digested DNA material on a non-denaturing gel to confirm the presence of characteristic bands of linear and continuous DNA as compared to linear and non-continuous DNA.

[0513] In yet another aspect, the disclosure provides for use of host cell lines that have stably integrated the DNA vector polynucleotide expression template (ceDNA template) into their own genome in production of the non-viral DNA vector, e.g., as described in Lee, L. et al. (2013) Plos One 8(8): e69879. Preferably, Rep is added to host cells at an MOI of about 3. When the host cell line is a mammalian cell line, e.g., HEK293 cells, the cell lines can have polynucleotide vector template stably integrated, and a second vector such as herpes virus can be used to introduce Rep protein into cells, allowing for the excision and amplification of ceDNA in the presence of Rep and helper virus.

[0514] In one embodiment, the host cells used to make the ceDNA vectors for expression of FVIII protein as described herein are insect cells, and baculovirus is used to deliver both the polynucleotide that encodes Rep protein and the non-viral DNA vector polynucleotide expression construct template for ceDNA, e.g., as described in FIGS. 4A-4C and Example 1. In some embodiments, the host cell is engineered to express Rep protein.

[0515] The ceDNA vector is then harvested and isolated from the host cells. The time for harvesting and collecting ceDNA vectors described herein from the cells can be selected and optimized to achieve a high-yield production of the ceDNA vectors. For example, the harvest time can be selected in view of cell viability, cell morphology, cell growth, etc. In one embodiment, cells are grown under sufficient conditions and harvested a sufficient time after baculoviral infection to produce ceDNA vectors but before a majority of cells start to die because of the baculoviral toxicity. The DNA vectors can be isolated using plasmid purification kits such as Qiagen Endo-Free Plasmid kits. Other methods developed for plasmid isolation can be also adapted for DNA vectors. Generally, any nucleic acid purification methods can be adopted.

[0516] The DNA vectors can be purified by any means known to those of skill in the art for purification of DNA. In one embodiment, ceDNA vectors are purified as DNA molecules. In another embodiment, the ceDNA vectors are purified as exosomes or microparticles.

[0517] The presence of the ceDNA vector for expression of FVIII protein can be confirmed by digesting the vector DNA isolated from the cells with a restriction enzyme having a single recognition site on the DNA vector and analyzing both digested and undigested DNA material using gel electrophoresis to confirm the presence of characteristic bands of linear and continuous DNA as compared to linear and non-continuous DNA. FIG. 4C and FIG. 4D illustrate one embodiment for identifying the presence of the closed ended ceDNA vectors produced by the processes herein.

B. ceDNA Plasmid

[0518] A ceDNA-plasmid is a plasmid used for later production of a ceDNA vector for expression of FVIII protein. In some embodiments, a ceDNA-plasmid can be constructed using known techniques to provide at least the following as operatively linked components in the direction of transcription: (1) a modified 5′ ITR sequence; (2) an expression cassette containing a cis-regulatory element, for example, a promoter, inducible promoter, regulatory switch, enhancers and the like; and (3) a modified 3′ ITR sequence, where the 3′ ITR sequence is symmetric relative to the 5′ ITR sequence. In some embodiments, the expression cassette flanked by the ITRs comprises a cloning site for introducing an exogenous sequence. The expression cassette replaces the rep and cap coding regions of the AAV genomes.

[0519] In one aspect, a ceDNA vector for expression of FVIII protein is obtained from a plasmid, referred to herein as a “ceDNA-plasmid” encoding in this order: a first adeno-associated virus (AAV) inverted terminal repeat (ITR), an expression cassette comprising a transgene, and a mutated or modified AAV ITR, wherein said ceDNA-plasmid is devoid of AAV capsid protein coding sequences. In alternative embodiments, the ceDNA-plasmid encodes in this order: a first (or 5′) modified or mutated AAV ITR, an expression cassette comprising a transgene, and a second (or 3′) modified AAV ITR, wherein said ceDNA-plasmid is devoid of AAV capsid protein coding sequences, and wherein the 5′ and 3′ ITRs are symmetric relative to each other. In alternative embodiments, the ceDNA-plasmid encodes in this order: a first (or 5′) modified or mutated AAV ITR, an expression cassette comprising a transgene, and a second (or 3′) mutated or modified AAV ITR, wherein said ceDNA-plasmid is devoid of AAV capsid protein coding sequences, and wherein the 5′ and 3′ modified ITRs are have the same modifications (i.e., they are inverse complement or symmetric relative to each other).

[0520] In a further embodiment, the ceDNA-plasmid system is devoid of viral capsid protein coding sequences (i.e. it is devoid of AAV capsid genes but also of capsid genes of other viruses). In addition, in a particular embodiment, the ceDNA-plasmid is also devoid of AAV Rep protein coding sequences. Accordingly, in a preferred embodiment, ceDNA-plasmid is devoid of functional AAV cap and AAV rep genes GG-3′ for AAV2) plus a variable palindromic sequence allowing for hairpin formation.

[0521] A ceDNA-plasmid of the present disclosure can be generated using natural nucleotide sequences of the genomes of any AAV serotypes well known in the art. In one embodiment, the ceDNA-plasmid backbone is derived from the AAV1, AAV2, AAV3, AAV4, AAV5, AAV 5, AAV7, AAV8, AAV9, AAV10, AAV 11, AAV12, AAVrh8, AAVrh10, AAV-DJ, and AAV-DJ8 genome. E.g., NCBI: NC 002077; NC 001401; NC001729; NC001829; NC006152; NC 006260; NC 006261; Kotin and Smith, The Springer Index of Viruses, available at the URL maintained by Springer (at www web address: oesys.springer.de/viruses/database/mkchapter.asp?virID=42.04.)(note—references to a URL or database refer to the contents of the URL or database as of the effective filing date of this application) In a particular embodiment, the ceDNA-plasmid backbone is derived from the AAV2 genome. In another particular embodiment, the ceDNA-plasmid backbone is a synthetic backbone genetically engineered to include at its 5′ and 3′ ITRs derived from one of these AAV genomes.

[0522] A ceDNA-plasmid can optionally include a selectable or selection marker for use in the establishment of a ceDNA vector-producing cell line. In one embodiment, the selection marker can be inserted downstream (i.e., 3′) of the 3′ ITR sequence. In another embodiment, the selection marker can be inserted upstream (i.e., 5′) of the 5′ ITR sequence. Appropriate selection markers include, for example, those that confer drug resistance. Selection markers can be, for example, a blasticidin S-resistance gene, kanamycin, geneticin, and the like. In a preferred embodiment, the drug selection marker is a blasticidin S-resistance gene.

[0523] An exemplary ceDNA (e.g., rAAV0) vector for expression of FVIII protein is produced from an rAAV plasmid. A method for the production of a rAAV vector, can comprise: (a) providing a host cell with a rAAV plasmid as described above, wherein both the host cell and the plasmid are devoid of capsid protein encoding genes, (b) culturing the host cell under conditions allowing production of an ceDNA genome, and (c) harvesting the cells and isolating the AAV genome produced from said cells.

C. Exemplary Method of Making the ceDNA Vectors from ceDNA Plasmids

[0524] Methods for making capsid-less ceDNA vectors for expression of FVIII protein are also provided herein, notably a method with a sufficiently high yield to provide sufficient vector for in vivo experiments.

[0525] In some embodiments, a method for the production of a ceDNA vector for expression of FVIII protein comprises the steps of: (1) introducing the nucleic acid construct comprising an expression cassette and two symmetric ITR sequences into a host cell (e.g., Sf9 cells), (2) optionally, establishing a clonal cell line, for example, by using a selection marker present on the plasmid, (3) introducing a Rep coding gene (either by transfection or infection with a baculovirus carrying said gene) into said insect cell, and (4) harvesting the cell and purifying the ceDNA vector. The nucleic acid construct comprising an expression cassette and two ITR sequences described above for the production of ceDNA vector can be in the form of a ceDNA plasmid, or Bacmid or Baculovirus generated with the ceDNA plasmid as described below. The nucleic acid construct can be introduced into a host cell by transfection, viral transduction, stable integration, or other methods known in the art.

### D. Cell Lines

[0526] Host cell lines used in the production of a ceDNA vector for expression of FVIII protein can include insect cell lines derived from Spodoptera frugiperda, such as Sf9 Sf21, or Trichoplusia ni cell, or other invertebrate, vertebrate, or other eukaryotic cell lines including mammalian cells. Other cell lines known to an ordinarily skilled artisan can also be used, such as HEK293, Huh-7, HeLa, HepG2, Hep1A, 911, CHO, COS, MeWo, NIH3T3, A549, HT1 180, monocytes, and mature and immature dendritic cells. Host cell lines can be transfected for stable expression of the ceDNA-plasmid for high yield ceDNA vector production.

[0527] CeDNA-plasmids can be introduced into Sf9 cells by transient transfection using reagents (e.g., liposomal, calcium phosphate) or physical means (e.g., electroporation) known in the art. Alternatively, stable Sf9 cell lines which have stably integrated the ceDNA-plasmid into their genomes can be established. Such stable cell lines can be established by incorporating a selection marker into the ceDNA-plasmid as described above. If the ceDNA-plasmid used to transfect the cell line includes a selection marker, such as an antibiotic, cells that have been transfected with the ceDNA-plasmid and integrated the ceDNA-plasmid DNA into their genome can be selected for by addition of the antibiotic to the cell growth media. Resistant clones of the cells can then be isolated by single-cell dilution or colony transfer techniques and propagated.

E. Isolating and Purifying ceDNA Vectors:

[0528] Examples of the process for obtaining and isolating ceDNA vectors are described in FIGS. 4A-4E and the specific examples below. ceDNA-vectors for expression of FVIII protein disclosed herein can be obtained from a producer cell expressing AAV Rep protein(s), further transformed with a ceDNA-plasmid, ceDNA-bacmid, or ceDNA-baculovirus. Plasmids useful for the production of ceDNA vectors include plasmids that encode FVIII protein, or plasmids encoding one or more REP proteins.

[0529] In one aspect, a polynucleotide encodes the AAV Rep protein (Rep 78 or 68) delivered to a producer cell in a plasmid (Rep-plasmid), a bacmid (Rep-bacmid), or a baculovirus (Rep-baculovirus). The Rep-plasmid, Rep-bacmid, and Rep-baculovirus can be generated by methods described above.

[0530] Methods to produce a ceDNA vector for expression of FVIII protein are described herein. Expression constructs used for generating a ceDNA vector for expression of FVIII protein as described herein can be a plasmid (e.g., ceDNA-plasmids), a Bacmid (e.g., ceDNA-bacmid), and/or a baculovirus (e.g., ceDNA-baculovirus). By way of an example only, a ceDNA-vector can be generated from the cells co-infected with ceDNA-baculovirus and Rep-baculovirus. Rep proteins produced from the Rep-baculovirus can replicate the ceDNA-baculovirus to generate ceDNA-vectors. Alternatively, ceDNA vectors for expression of FVIII protein can be generated from the cells stably transfected with a construct comprising a sequence encoding the AAV Rep protein (Rep78/52) delivered in Rep-plasmids, Rep-bacmids, or Rep-baculovirus. CeDNA-Baculovirus can be transiently transfected to the cells, be replicated by Rep protein and produce ceDNA vectors.

[0531] The bacmid (e.g., ceDNA-bacmid) can be transfected into permissive insect cells such as Sf9, Sf21, Tni (Trichoplusia ni) cell, High Five cell, and generate ceDNA-baculovirus, which is a recombinant baculovirus including the sequences comprising the symmetric ITRs and the expression cassette. ceDNA-baculovirus can be again infected into the insect cells to obtain a next generation of the recombinant baculovirus. Optionally, the step can be repeated once or multiple times to produce the recombinant baculovirus in a larger quantity.

[0532] The time for harvesting and collecting ceDNA vectors for expression of FVIII protein as described herein from the cells can be selected and optimized to achieve a high-yield production of the ceDNA vectors. For example, the harvest time can be selected in view of cell viability, cell morphology, cell growth, etc. Usually, cells can be harvested after sufficient time after baculoviral infection to produce ceDNA vectors (e.g., ceDNA vectors) but before majority of cells start to die because of the viral toxicity. The ceDNA-vectors can be isolated from the Sf9 cells using plasmid purification kits such as Qiagen ENDO-FREE PLASMID® kits. Other methods developed for plasmid isolation can be also adapted for ceDNA vectors. Generally, any art-known nucleic acid purification methods can be adopted, as well as commercially available DNA extraction kits.

[0533] Alternatively, purification can be implemented by subjecting a cell pellet to an alkaline lysis process, centrifuging the resulting lysate and performing chromatographic separation. As one non-limiting example, the process can be performed by loading the supernatant on an ion exchange column (e.g., SARTOBIND Q®) which retains nucleic acids, and then eluting (e.g., with a 1.2 M NaCl solution) and performing a further chromatographic purification on a gel filtration column (e.g., 6 fast flow GE). The capsid-free AAV vector is then recovered by, e.g., precipitation.

[0534] In some embodiments, ceDNA vectors for expression of FVIII protein can also be purified in the form of exosomes, or microparticles. It is known in the art that many cell types release not only soluble proteins, but also complex protein/nucleic acid cargoes via membrane microvesicle shedding (Cocucci et al, 2009; EP 10306226.1) Such vesicles include microvesicles (also referred to as microparticles) and exosomes (also referred to as nanovesicles), both of which comprise proteins and RNA as cargo. Microvesicles are generated from the direct budding of the plasma membrane, and exosomes are released into the extracellular environment upon fusion of multivesicular endosomes with the plasma membrane. Thus, ceDNA vector-containing microvesicles and/or exosomes can be isolated from cells that have been transduced with the ceDNA-plasmid or a bacmid or baculovirus generated with the ceDNA-plasmid.

[0535] Microvesicles can be isolated by subjecting culture medium to filtration or ultracentrifugation at 20,000×g, and exosomes at 100,000×g. The optimal duration of ultracentrifugation can be experimentally-determined and will depend on the particular cell type from which the vesicles are isolated. Preferably, the culture medium is first cleared by low-speed centrifugation (e.g., at 2000×g for 5-20 minutes) and subjected to spin concentration using, e.g., an AMICON® spin column (Millipore, Watford, UK). Microvesicles and exosomes can be further purified via FACS or MACS by using specific antibodies that recognize specific surface antigens present on the microvesicles and exosomes. Other microvesicle and exosome purification methods include, but are not limited to, immunoprecipitation, affinity chromatography, filtration, and magnetic beads coated with specific antibodies or aptamers. Upon purification, vesicles are washed with, e.g., phosphate-buffered saline. One advantage of using microvesicles or exosome to deliver ceDNA-containing vesicles is that these vesicles can be targeted to various cell types by including on their membrane proteins recognized by specific receptors on the respective cell types. (See also EP 10306226)

[0536] Another aspect of the disclosure herein relates to methods of purifying ceDNA vectors from host cell lines that have stably integrated a ceDNA construct into their own genome. In one embodiment, ceDNA vectors are purified as DNA molecules. In another embodiment, the ceDNA vectors are purified as exosomes or microparticles.

[0537] FIG. 5 of International application PCT/US18/49996 shows a gel confirming the production of ceDNA from multiple ceDNA-plasmid constructs using the method described in the Examples. The ceDNA is confirmed by a characteristic band pattern in the gel, as discussed with respect to FIG. 4D in the Examples.

### VII. Pharmaceutical Compositions

[0538] In another aspect, pharmaceutical compositions are provided. The pharmaceutical composition comprises a ceDNA vector for expression of FVIII protein as described herein and a pharmaceutically acceptable carrier or diluent.

[0539] The ceDNA vectors for expression of FVIII protein as disclosed herein can be incorporated into pharmaceutical compositions suitable for administration to a subject for in vivo delivery to cells, tissues, or organs of the subject. Typically, the pharmaceutical composition comprises a ceDNA-vector as disclosed herein and a pharmaceutically acceptable carrier. For example, the ceDNA vectors for expression of FVIII protein as described herein can be incorporated into a pharmaceutical composition suitable for a desired route of therapeutic administration (e.g., parenteral administration). Passive tissue transduction via high pressure intravenous or intra-arterial infusion, as well as intracellular injection, such as intranuclear microinjection or intracytoplasmic injection, are also contemplated. Pharmaceutical compositions for therapeutic purposes can be formulated as a solution, microemulsion, dispersion, liposomes, or other ordered structure suitable to high ceDNA vector concentration. Sterile injectable solutions can be prepared by incorporating the ceDNA vector compound in the required amount in an appropriate buffer with one or a combination of ingredients enumerated above, as required, followed by filtered sterilization including a ceDNA vector can be formulated to deliver a transgene in the nucleic acid to the cells of a recipient, resulting in the therapeutic expression of the transgene or donor sequence therein. The composition can also include a pharmaceutically acceptable carrier.

[0540] Pharmaceutically active compositions comprising a ceDNA vector for expression of FVIII protein can be formulated to deliver a transgene for various purposes to the cell, e.g., cells of a subject.

[0541] Pharmaceutical compositions for therapeutic purposes typically must be sterile and stable under the conditions of manufacture and storage. The composition can be formulated as a solution, microemulsion, dispersion, liposomes, or other ordered structure suitable to high ceDNA vector concentration. Sterile injectable solutions can be prepared by incorporating the ceDNA vector compound in the required amount in an appropriate buffer with one or a combination of ingredients enumerated above, as required, followed by filtered sterilization.

[0542] A ceDNA vector for expression of FVIII protein as disclosed herein can be incorporated into a pharmaceutical composition suitable for topical, systemic, intra-amniotic, intrathecal, intracranial, intra-arterial, intravenous, intralymphatic, intraperitoneal, subcutaneous, tracheal, intra-tissue (e.g., intramuscular, intracardiac, intrahepatic, intrarenal, intracerebral), intrathecal, intravesical, conjunctival (e.g., extra-orbital, intraorbital, retroorbital, intraretinal, subretinal, choroidal, sub-choroidal, intrastromal, intracameral and intravitreal), intracochlear, and mucosal (e.g., oral, rectal, nasal) administration. Passive tissue transduction via high pressure intravenous or intraarterial infusion, as well as intracellular injection, such as intranuclear microinjection or intracytoplasmic injection, are also contemplated.

[0543] In some aspects, the methods provided herein comprise delivering one or more ceDNA vectors for expression of FVIII protein as disclosed herein to a host cell. Also provided herein are cells produced by such methods, and organisms (such as animals, plants, or fungi) comprising or produced from such cells. Methods of delivery of nucleic acids can include lipofection, nucleofection, microinjection, biolistics, liposomes, immunoliposomes, polycation or lipid:nucleic acid conjugates, naked DNA, and agent-enhanced uptake of DNA. Lipofection is described in e.g., U.S. Pat. Nos. 5,049,386, 4,946,787; and 4,897,355, the contents of each of which are incorporated by reference in their entireties herein) and lipofection reagents are sold commercially (e.g., TRANSFECTAM™ and LIPFECTIN™). Delivery can be to cells (e.g., in vitro or ex vivo administration) or target tissues (e.g., in vivo administration).

[0544] Various techniques and methods are known in the art for delivering nucleic acids to cells. For example, nucleic acids, such as ceDNA for expression of FVIII protein can be formulated into lipid nanoparticles (LNPs), lipidoids, liposomes, lipid nanoparticles, lipoplexes, or core-shell nanoparticles. Typically, LNPs are composed of nucleic acid (e.g., ceDNA) molecules, one or more ionizable or cationic lipids (or salts thereof), one or more non-ionic or neutral lipids (e.g., a phospholipid), a molecule that prevents aggregation (e.g., PEG or a PEG-lipid conjugate), and optionally a sterol (e.g., cholesterol).

[0545] Another method for delivering nucleic acids, such as ceDNA for expression of FVIII protein to a cell is by conjugating the nucleic acid with a ligand that is internalized by the cell. For example, the ligand can bind a receptor on the cell surface and internalized via endocytosis. The ligand can be covalently linked to a nucleotide in the nucleic acid. Exemplary conjugates for delivering nucleic acids into a cell are described, example, in WO2015/006740, WO2014/025805, WO2012/037254, WO2009/082606, WO2009/073809, WO2009/018332, WO2006/112872, WO2004/090108, WO2004/091515 and WO2017/177326, the contents of each of which are incorporated by reference in their entireties herein.

[0546] Nucleic acids, such as ceDNA vectors for expression of FVIII protein can also be delivered to a cell by transfection. Useful transfection methods include, but are not limited to, lipid-mediated transfection, cationic polymer-mediated transfection, or calcium phosphate precipitation. Transfection reagents are well known in the art and include, but are not limited to, TurboFect Transfection Reagent (Thermo Fisher Scientific), Pro-Ject Reagent (Thermo Fisher Scientific), TRANSPASS™ P Protein Transfection Reagent (New England Biolabs), CHARIOT™ Protein Delivery Reagent (Active Motif), PROTEOJUICE™ Protein Transfection Reagent (EMD Millipore), 293fectin, LIPOFECTAMINE™ 2000, LIPOFECTAMINE™ 3000 (Thermo Fisher Scientific), LIPOFECTAMINE™ (Thermo Fisher Scientific), LIPOFECTIN™ (Thermo Fisher Scientific), DMRIE-C, CELLFECTIN™ (Thermo Fisher Scientific), OLIGOFECTAMINE™ (Thermo Fisher Scientific), LIPOFECTACE™, FUGENE™ (Roche, Basel, Switzerland), FUGENE™ HD (Roche), TRANSFECTAM™ (Transfectam, Promega, Madison, Wis.), TFX-10™ (Promega), TFX-20™ (Promega), TFX-50™ (Promega), TRANSFECTIN™ (BioRad, Hercules, Calif.), SILENTFECT™ (Bio-Rad), Effectene™ (Qiagen, Valencia, Calif.), DC-chol (Avanti Polar Lipids), GENEPORTER™ (Gene Therapy Systems, San Diego, Calif.), DHARMAFECT 1™ (Dharmacon, Lafayette, Colo.), DHARMAFECT 2™ (Dharmacon), DHARMAFECT 3™ (Dharmacon), DHARMAFECT 4™ (Dharmacon), ESCORT™ III (Sigma, St. Louis, Mo.), and ESCORT™ IV (Sigma Chemical Co.). Nucleic acids, such as ceDNA, can also be delivered to a cell via microfluidics methods known to those of skill in the art.

[0547] ceDNA vectors for expression of FVIII protein as described herein can also be administered directly to an organism for transduction of cells in vivo. Administration is by any of the routes normally used for introducing a molecule into ultimate contact with blood or tissue cells including, but not limited to, injection, infusion, topical application and electroporation. Suitable methods of administering such nucleic acids are available and well known to those of skill in the art, and, although more than one route can be used to administer a particular composition, a particular route can often provide a more immediate and more effective reaction than another route.

[0548] Methods for introduction of a nucleic acid vector ceDNA vector for expression of FVIII protein as disclosed herein can be delivered into hematopoietic stem cells, for example, by the methods as described, for example, in U.S. Pat. No. 5,928,638, the contents of which is incorporated by reference in its entirety herein.

[0549] The ceDNA vectors for expression of FVIII protein in accordance with the present disclosure can be added to liposomes for delivery to a cell or target organ in a subject. Liposomes are vesicles that possess at least one lipid bilayer. Liposomes are typical used as carriers for drug/therapeutic delivery in the context of pharmaceutical development. They work by fusing with a cellular membrane and repositioning its lipid structure to deliver a drug or active pharmaceutical ingredient (API). Liposome compositions for such delivery are composed of phospholipids, especially compounds having a phosphatidylcholine group, however these compositions may also include other lipids. Exemplary liposomes and liposome formulations, including but not limited to polyethylene glycol (PEG)-functional group containing compounds are disclosed in International Application PCT/US2018/050042, filed on Sep. 7, 2018 and in International application PCT/US2018/064242, filed on Dec. 6, 2018, e.g., see the section entitled “Pharmaceutical Formulations”.

[0550] Various delivery methods known in the art or modification thereof can be used to deliver ceDNA vectors in vitro or in vivo. For example, in some embodiments, ceDNA vectors for expression of FVIII protein are delivered by making transient penetration in cell membrane by mechanical, electrical, ultrasonic, hydrodynamic, or laser-based energy so that DNA entrance into the targeted cells is facilitated. For example, a ceDNA vector can be delivered by transiently disrupting cell membrane by squeezing the cell through a size-restricted channel or by other means known in the art. In some cases, a ceDNA vector alone is directly injected as naked DNA into any one of: any one or more tissues selected from: liver, kidneys, gallbladder, prostate, adrenal gland, heart, intestine, lung, and stomach, skin, thymus, cardiac muscle or skeletal muscle. In some cases, a ceDNA vector is delivered by gene gun. Gold or tungsten spherical particles (1-3 μm diameter) coated with capsid-free AAV vectors can be accelerated to high speed by pressurized gas to penetrate into target tissue cells.

[0551] Compositions comprising a ceDNA vector for expression of FVIII protein and a pharmaceutically acceptable carrier are specifically contemplated herein. In some embodiments, the ceDNA vector is formulated with a lipid delivery system, for example, liposomes as described herein. In some embodiments, such compositions are administered by any route desired by a skilled practitioner. The compositions may be administered to a subject by different routes including orally, parenterally, sublingually, transdermally, rectally, transmucosally, topically, via inhalation, via buccal administration, intrapleurally, intravenous, intra-arterial, intraperitoneal, subcutaneous, intramuscular, intranasal intrathecal, and intraarticular or combinations thereof. For veterinary use, the composition may be administered as a suitably acceptable formulation in accordance with normal veterinary practice. The veterinarian may readily determine the dosing regimen and route of administration that is most appropriate for a particular animal. The compositions may be administered by traditional syringes, needleless injection devices, “microprojectile bombardment gene guns”, or other physical methods such as electroporation (“EP”), hydrodynamic methods, or ultrasound.

[0552] In some cases, a ceDNA vector for expression of FVIII protein is delivered by hydrodynamic injection, which is a simple and highly efficient method for direct intracellular delivery of any water-soluble compounds and particles into internal organs and skeletal muscle in an entire limb.

[0553] In some cases, ceDNA vectors for expression of FVIII protein are delivered by ultrasound by making nanoscopic pores in membrane to facilitate intracellular delivery of DNA particles into cells of internal organs or tumors, so the size and concentration of plasmid DNA have great role in efficiency of the system. In some cases, ceDNA vectors are delivered by magnetofection by using magnetic fields to concentrate particles containing nucleic acid into the target cells.

[0554] In some cases, chemical delivery systems can be used, for example, by using nanomeric complexes, which include compaction of negatively charged nucleic acid by polycationic nanomeric particles, belonging to cationic liposome/micelle or cationic polymers. Cationic lipids used for the delivery method includes, but not limited to monovalent cationic lipids, polyvalent cationic lipids, guanidine containing compounds, cholesterol derivative compounds, cationic polymers, (e.g., poly(ethylenimine), poly-L-lysine, protamine, other cationic polymers), and lipid-polymer hybrid.

### A. Exosomes

[0555] In some embodiments, a ceDNA vector for expression of FVIII protein as disclosed herein is delivered by being packaged in an exosome. Exosomes are small membrane vesicles of endocytic origin that are released into the extracellular environment following fusion of multivesicular bodies with the plasma membrane. Their surface consists of a lipid bilayer from the donor cell's cell membrane, they contain cytosol from the cell that produced the exosome, and exhibit membrane proteins from the parental cell on the surface. Exosomes are produced by various cell types including epithelial cells, B and T lymphocytes, mast cells (MC) as well as dendritic cells (DC). Some embodiments, exosomes with a diameter between 10 nm and 1 μm, between 20 nm and 500 nm, between 30 nm and 250 nm, between 50 nm and 100 nm are envisioned for use. Exosomes can be isolated for a delivery to target cells using either their donor cells or by introducing specific nucleic acids into them. Various approaches known in the art can be used to produce exosomes containing capsid-free AAV vectors of the present disclosure.

### B. Microparticle/Nanoparticles

[0556] In some embodiments, a ceDNA vector for expression of FVIII protein as disclosed herein is delivered by a lipid nanoparticle. Generally, lipid nanoparticles comprise an ionizable amino lipid (e.g., heptatriaconta-6,9,28,31-tetraen-19-yl 4-(dimethylamino)butanoate, DLin-MC3-DMA, a phosphatidylcholine (1,2-distearoyl-sn-glycero-3-phosphocholine, DSPC), cholesterol and a coat lipid (polyethylene glycol-dimyristolglycerol, PEG-DMG), for example as disclosed by Tam et al. (2013). Advances in Lipid Nanoparticles for siRNA delivery. Pharmaceuticals 5(3): 498-507.

[0557] In some embodiments, a lipid nanoparticle has a mean diameter between about 10 and about 1000 nm. In some embodiments, a lipid nanoparticle has a diameter that is less than 300 nm. In some embodiments, a lipid nanoparticle has a diameter between about 10 and about 300 nm. In some embodiments, a lipid nanoparticle has a diameter that is less than 200 nm. In some embodiments, a lipid nanoparticle has a diameter between about 25 and about 200 nm. In some embodiments, a lipid nanoparticle preparation (e.g., composition comprising a plurality of lipid nanoparticles) has a size distribution in which the mean size (e.g., diameter) is about 70 nm to about 200 nm, and more typically the mean size is about 100 nm or less.

[0558] Various lipid nanoparticles known in the art can be used to deliver ceDNA vector for expression of FVIII protein as disclosed herein. For example, various delivery methods using lipid nanoparticles are described in U.S. Pat. Nos. 9,404,127, 9,006,417 and 9,518,272.

[0559] In some embodiments, a ceDNA vector for expression of FVIII protein as disclosed herein is delivered by a gold nanoparticle. Generally, a nucleic acid can be covalently bound to a gold nanoparticle or non-covalently bound to a gold nanoparticle (e.g., bound by a charge-charge interaction), for example as described by Ding et al. (2014). Gold Nanoparticles for Nucleic Acid Delivery. Mol. Ther. 22(6); 1075-1083. In some embodiments, gold nanoparticle-nucleic acid conjugates are produced using methods described, for example, in U.S. Pat. No. 6,812,334.

### C. Conjugates

[0560] In some embodiments, a ceDNA vector for expression of FVIII protein as disclosed herein is conjugated (e.g., covalently bound to an agent that increases cellular uptake. An “agent that increases cellular uptake” is a molecule that facilitates transport of a nucleic acid across a lipid membrane. For example, a nucleic acid can be conjugated to a lipophilic compound (e.g., cholesterol, tocopherol, etc.), a cell penetrating peptide (CPP) (e.g., penetratin, TAT, Syn1B, etc.), and polyamines (e.g., spermine). Further examples of agents that increase cellular uptake are disclosed, for example, in Winkler (2013). Oligonucleotide conjugates for therapeutic applications. Ther. Deliv. 4(7); 791-809.

[0561] In some embodiments, a ceDNA vector for expression of FVIII protein as disclosed herein is conjugated to a polymer (e.g., a polymeric molecule) or a folate molecule (e.g., folic acid molecule). Generally, delivery of nucleic acids conjugated to polymers is known in the art, for example as described in WO2000/34343 and WO2008/022309. In some embodiments, a ceDNA vector for expression of FVIII protein as disclosed herein is conjugated to a poly(amide) polymer, for example as described by U.S. Pat. No. 8,987,377. In some embodiments, a nucleic acid described by the disclosure is conjugated to a folic acid molecule as described in U.S. Pat. No. 8,507,455.

[0562] In some embodiments, a ceDNA vector for expression of FVIII protein as disclosed herein is conjugated to a carbohydrate, for example as described in U.S. Pat. No. 8,450,467.

### D. Nanocapsule

[0563] Alternatively, nanocapsule formulations of a ceDNA vector for expression of FVIII protein as disclosed herein can be used. Nanocapsules can generally entrap substances in a stable and reproducible way. To avoid side effects due to intracellular polymeric overloading, such ultrafine particles (sized around 0.1 μm) should be designed using polymers able to be degraded in vivo. Biodegradable polyalkyl-cyanoacrylate nanoparticles that meet these requirements are contemplated for use.

### E. Liposomes

[0564] The ceDNA vectors for expression of FVIII protein in accordance with the present disclosure can be added to liposomes for delivery to a cell or target organ in a subject. Liposomes are vesicles that possess at least one lipid bilayer. Liposomes are typical used as carriers for drug/therapeutic delivery in the context of pharmaceutical development. They work by fusing with a cellular membrane and repositioning its lipid structure to deliver a drug or active pharmaceutical ingredient (API). Liposome compositions for such delivery are composed of phospholipids, especially compounds having a phosphatidylcholine group, however these compositions may also include other lipids.

[0565] The formation and use of liposomes are generally known to those of skill in the art. Liposomes have been developed with improved serum stability and circulation half-times (U.S. Pat. No. 5,741,516). Further, various methods of liposome and liposome like preparations as potential drug carriers have been described (U.S. Pat. Nos. 5,567,434; 5,552,157; 5,565,213; 5,738,868 and 5,795,587).

### F. Exemplary Liposome and Lipid Nanoparticle (LNP) Compositions

[0566] The ceDNA vectors for expression of FVIII protein in accordance with the present disclosure can be added to liposomes for delivery to a cell, e.g., a cell in need of expression of the transgene. Liposomes are vesicles that possess at least one lipid bilayer. Liposomes are typical used as carriers for drug/therapeutic delivery in the context of pharmaceutical development. They work by fusing with a cellular membrane and repositioning its lipid structure to deliver a drug or active pharmaceutical ingredient (API). Liposome compositions for such delivery are composed of phospholipids, especially compounds having a phosphatidylcholine group, however these compositions may also include other lipids.

[0567] Lipid nanoparticles (LNPs) comprising ceDNA vectors are disclosed in International Application PCT/US2018/050042, filed on Sep. 7, 2018, and International Application PCT/US2018/064242, filed on Dec. 6, 2018 which are incorporated herein in their entirety and envisioned for use in the methods and compositions for ceDNA vectors for expression of FVIII protein as disclosed herein.

[0568] In some aspects, the disclosure provides for a liposome formulation that includes one or more compounds with a polyethylene glycol (PEG) functional group (so-called “PEG-ylated compounds”) which can reduce the immunogenicity/antigenicity of, provide hydrophilicity and hydrophobicity to the compound(s) and reduce dosage frequency. Or the liposome formulation simply includes polyethylene glycol (PEG) polymer as an additional component. In such aspects, the molecular weight of the PEG or PEG functional group can be from 62 Da to about 5,000 Da.

[0569] In some aspects, the disclosure provides for a liposome formulation that will deliver an API with extended release or controlled release profile over a period of hours to weeks. In some related aspects, the liposome formulation may comprise aqueous chambers that are bound by lipid bilayers. In other related aspects, the liposome formulation encapsulates an API with components that undergo a physical transition at elevated temperature which releases the API over a period of hours to weeks.

[0570] In some aspects, the liposome formulation comprises sphingomyelin and one or more lipids disclosed herein. In some aspects, the liposome formulation comprises optisomes.

[0571] In some aspects, the disclosure provides for a liposome formulation that includes one or more lipids selected from: N-(carbonyl-methoxypolyethylene glycol 2000)-1,2-distearoyl-sn-glycero-3-phosphoethanolamine sodium salt, (distearoyl-sn-glycero-phosphoethanolamine), MPEG (methoxy polyethylene glycol)-conjugated lipid, HSPC (hydrogenated soy phosphatidylcholine); PEG (polyethylene glycol); DSPE (distearoyl-sn-glycero-phosphoethanolamine); DSPC (distearoylphosphatidylcholine); DOPC (dioleoylphosphatidylcholine); DPPG (dipalmitoylphosphatidylglycerol); EPC (egg phosphatidylcholine); DOPS (dioleoylphosphatidylserine); POPC (palmitoyloleoylphosphatidylcholine); SM (sphingomyelin); MPEG (methoxy polyethylene glycol); DMPC (dimyristoyl phosphatidylcholine); DMPG (dimyristoyl phosphatidylglycerol); DSPG (distearoylphosphatidylglycerol); DEPC (dierucoylphosphatidylcholine); DOPE (dioleoly-sn-glycero-phophoethanolamine); cholesteryl sulphate (CS); dipalmitoylphosphatidylglycerol (DPPG); DOPC (dioleoly-sn-glycero-phosphatidylcholine) or any combination thereof.

[0572] In some aspects, the disclosure provides for a liposome formulation comprising phospholipid, cholesterol and a PEG-ylated lipid in a molar ratio of 56:38:5. In some aspects, the liposome formulation's overall lipid content is from 2-16 mg/mL. In some aspects, the disclosure provides for a liposome formulation comprising a lipid containing a phosphatidylcholine functional group, a lipid containing an ethanolamine functional group and a PEG-ylated lipid. In some aspects, the disclosure provides for a liposome formulation comprising a lipid containing a phosphatidylcholine functional group, a lipid containing an ethanolamine functional group and a PEG-ylated lipid in a molar ratio of 3:0.015:2 respectively. In some aspects, the disclosure provides for a liposome formulation comprising a lipid containing a phosphatidylcholine functional group, cholesterol and a PEG-ylated lipid. In some aspects, the disclosure provides for a liposome formulation comprising a lipid containing a phosphatidylcholine functional group and cholesterol. In some aspects, the PEG-ylated lipid is PEG-2000-DSPE. In some aspects, the disclosure provides for a liposome formulation comprising DPPG, soy PC, MPEG-DSPE lipid conjugate and cholesterol.

[0573] In some aspects, the disclosure provides for a liposome formulation comprising one or more lipids containing a phosphatidylcholine functional group and one or more lipids containing an ethanolamine functional group. In some aspects, the disclosure provides for a liposome formulation comprising one or more: lipids containing a phosphatidylcholine functional group, lipids containing an ethanolamine functional group, and sterols, e.g., cholesterol. In some aspects, the liposome formulation comprises DOPC/DEPC; and DOPE.

[0574] In some aspects, the disclosure provides for a liposome formulation further comprising one or more pharmaceutical excipients, e.g., sucrose and/or glycine.

[0575] In some aspects, the disclosure provides for a liposome formulation that is either unilamellar or multilamellar in structure. In some aspects, the disclosure provides for a liposome formulation that comprises multi-vesicular particles and/or foam-based particles. In some aspects, the disclosure provides for a liposome formulation that are larger in relative size to common nanoparticles and about 150 to 250 nm in size. In some aspects, the liposome formulation is a lyophilized powder.

[0576] In some aspects, the disclosure provides for a liposome formulation that is made and loaded with ceDNA vectors disclosed or described herein, by adding a weak base to a mixture having the isolated ceDNA outside the liposome. This addition increases the pH outside the liposomes to approximately 7.3 and drives the API into the liposome. In some aspects, the disclosure provides for a liposome formulation having a pH that is acidic on the inside of the liposome. In such cases the inside of the liposome can be at pH 4-6.9, and more preferably pH 6.5. In other aspects, the disclosure provides for a liposome formulation made by using intra-liposomal drug stabilization technology. In such cases, polymeric or non-polymeric highly charged anions and intra-liposomal trapping agents are utilized, e.g., polyphosphate or sucrose octasulfate.

[0577] In some aspects, the disclosure provides for a lipid nanoparticle comprising ceDNA and an ionizable lipid. For example, a lipid nanoparticle formulation that is made and loaded with ceDNA obtained by the process as disclosed in International Application PCT/US2018/050042, filed on Sep. 7, 2018, which is incorporated herein. This can be accomplished by high energy mixing of ethanolic lipids with aqueous ceDNA at low pH which protonates the ionizable lipid and provides favorable energetics for ceDNA/lipid association and nucleation of particles. The particles can be further stabilized through aqueous dilution and removal of the organic solvent. The particles can be concentrated to the desired level.

[0578] Generally, the lipid particles are prepared at a total lipid to ceDNA (mass or weight) ratio of from about 10:1 to 30:1. In some embodiments, the lipid to ceDNA ratio (mass/mass ratio; w/w ratio) can be in the range of from about 1:1 to about 25:1, from about 10:1 to about 14:1, from about 3:1 to about 15:1, from about 4:1 to about 10:1, from about 5:1 to about 9:1, or about 6:1 to about 9:1. The amounts of lipids and ceDNA can be adjusted to provide a desired N/P ratio, for example, N/P ratio of 3, 4, 5, 6, 7, 8, 9, 10 or higher. Generally, the lipid particle formulation's overall lipid content can range from about 5 mg/ml to about 30 mg/mL.

[0579] The ionizable lipid is typically employed to condense the nucleic acid cargo, e.g., ceDNA at low pH and to drive membrane association and fusogenicity. Generally, ionizable lipids are lipids comprising at least one amino group that is positively charged or becomes protonated under acidic conditions, for example at pH of 6.5 or lower. Ionizable lipids are also referred to as cationic lipids herein.

[0580] Exemplary ionizable lipids are described in International PCT patent publications WO2015/095340, WO2015/199952, WO2018/011633, WO2017/049245, WO2015/061467, WO2012/040184, WO2012/000104, WO2015/074085, WO2016/081029, WO2017/004143, WO2017/075531, WO2017/117528, WO2011/022460, WO2013/148541, WO2013/116126, WO2011/153120, WO2012/044638, WO2012/054365, WO2011/090965, WO2013/016058, WO2012/162210, WO2008/042973, WO2010/129709, WO2010/144740, WO2012/099755, WO2013/049328, WO2013/086322, WO2013/086373, WO2011/071860, WO2009/132131, WO2010/048536, WO2010/088537, WO2010/054401, WO2010/054406, WO2010/054405, WO2010/054384, WO2012/016184, WO2009/086558, WO2010/042877, WO2011/000106, WO2011/000107, WO2005/120152, WO2011/141705, WO2013/126803, WO2006/007712, WO2011/038160, WO2005/121348, WO2011/066651, WO2009/127060, WO2011/141704, WO2006/069782, WO2012/031043, WO2013/006825, WO2013/033563, WO2013/089151, WO2017/099823, WO2015/095346, and WO2013/086354, and US patent publications US2016/0311759, US2015/0376115, US2016/0151284, US2017/0210697, US2015/0140070, US2013/0178541, US2013/0303587, US2015/0141678, US2015/0239926, US2016/0376224, US2017/0119904, US2012/0149894, US2015/0057373, US2013/0090372, US2013/0274523, US2013/0274504, US2013/0274504, US2009/0023673, US2012/0128760, US2010/0324120, US2014/0200257, US2015/0203446, US2018/0005363, US2014/0308304, US2013/0338210, US2012/0101148, US2012/0027796, US2012/0058144, US2013/0323269, US2011/0117125, US2011/0256175, US2012/0202871, US2011/0076335, US2006/0083780, US2013/0123338, US2015/0064242, US2006/0051405, US2013/0065939, US2006/0008910, US2003/0022649, US2010/0130588, US2013/0116307, US2010/0062967, US2013/0202684, US2014/0141070, US2014/0255472, US2014/0039032, US2018/0028664, US2016/0317458, and US2013/0195920, the contents of all of which are incorporated herein by reference in their entireties.

[0581] In some embodiments, the ionizable lipid is MC3 (6Z,9Z,28Z,31Z)-heptatriaconta-6,9,28,31-tetraen-19-yl-4-(dimethylamino) butanoate (DLin-MC3-DMA or MC3) having the following structure:

[chemical structure]

[0582] The lipid DLin-MC3-DMA is described in Jayaraman et al., Angew. Chem. Int. Ed Engl. (2012), 51(34): 8529-8533, content of which is incorporated herein by reference in its entirety.

[0583] In some embodiments, the ionizable lipid is the lipid ATX-002 as described in WO2015/074085, content of which is incorporated herein by reference in its entirety.

[0584] In some embodiments, the ionizable lipid is (13Z,16Z)—N,N-dimethyl-3-nonyldocosa-13,16-dien-1-amine (Compound 32), as described in WO2012/040184, the contents of which is incorporated herein by reference in its entirety.

[0585] In some embodiments, the ionizable lipid is Compound 6 or Compound 22 as described in WO2015/199952, the contents of which is incorporated herein by reference in its entirety.

[0586] Without limitations, ionizable lipid can comprise 20-90% (mol) of the total lipid present in the lipid nanoparticle. For example, ionizable lipid molar content can be 20-70% (mol), 30-60% (mol) or 40-50% (mol) of the total lipid present in the lipid nanoparticle. In some embodiments, ionizable lipid comprises from about 50 mol % to about 90 mol % of the total lipid present in the lipid nanoparticle.

[0587] In some aspects, the lipid nanoparticle can further comprise a non-cationic lipid. Non-ionic lipids include amphipathic lipids, neutral lipids and anionic lipids. Accordingly, the non-cationic lipid can be a neutral uncharged, zwitterionic, or anionic lipid. Non-cationic lipids are typically employed to enhance fusogenicity.

[0588] Exemplary non-cationic lipids envisioned for use in the methods and compositions as disclosed herein are described in International Application PCT/US2018/050042, filed on Sep. 7, 2018, and PCT/US2018/064242, filed on Dec. 6, 2018 which is incorporated herein in its entirety. Exemplary non-cationic lipids are described in International Application Publication WO2017/099823 and US patent publication US2018/0028664, the contents of both of which are incorporated herein by reference in their entirety.

[0589] The non-cationic lipid can comprise 0-30% (mol) of the total lipid present in the lipid nanoparticle. For example, the non-cationic lipid content is 5-20% (mol) or 10-15% (mol) of the total lipid present in the lipid nanoparticle. In various embodiments, the molar ratio of ionizable lipid to the neutral lipid ranges from about 2:1 to about 8:1.

[0590] In some embodiments, the lipid nanoparticles do not comprise any phospholipids. In some aspects, the lipid nanoparticle can further comprise a component, such as a sterol, to provide membrane integrity.

[0591] One exemplary sterol that can be used in the lipid nanoparticle is cholesterol and derivatives thereof. Exemplary cholesterol derivatives are described in International application WO2009/127060 and US patent publication US2010/0130588, the contents of both of which are incorporated herein by reference in their entireties.

[0592] The component providing membrane integrity, such as a sterol, can comprise 0-50% (mol) of the total lipid present in the lipid nanoparticle. In some embodiments, such a component is 20-50% (mol) 30-40% (mol) of the total lipid content of the lipid nanoparticle.

[0593] In some aspects, the lipid nanoparticle can further comprise a polyethylene glycol (PEG) or a conjugated lipid molecule. Generally, these are used to inhibit aggregation of lipid nanoparticles and/or provide steric stabilization. Exemplary conjugated lipids include, but are not limited to, PEG-lipid conjugates, polyoxazoline (POZ)-lipid conjugates, polyamide-lipid conjugates (such as ATTA-lipid conjugates), cationic-polymer lipid (CPL) conjugates, and mixtures thereof. In some embodiments, the conjugated lipid molecule is a PEG-lipid conjugate, for example, a (methoxy polyethylene glycol)-conjugated lipid. Exemplary PEG-lipid conjugates include, but are not limited to, PEG-diacylglycerol (DAG) (such as 1-(monomethoxy-polyethyleneglycol)-2,3-dimyristoylglycerol (PEG-DMG)), PEG-dialkyloxypropyl (DAA), PEG-phospholipid, PEG-ceramide (Cer), a pegylated phosphatidylethanoloamine (PEG-PE), PEG succinate diacylglycerol (PEGS-DAG) (such as 4-O-(2′,3′-di(tetradecanoyloxy)propyl-1-O-(w-methoxy(polyethoxy)ethyl) butanedioate (PEG-S-DMG)), PEG dialkoxypropylcarbam, N-(carbonyl-methoxypolyethylene glycol 2000)-1,2-distearoyl-sn-glycero-3-phosphoethanolamine sodium salt, or a mixture thereof. Additional exemplary PEG-lipid conjugates are described, for example, in U.S. Pat. Nos. 5,885,613, 6,287,591, US2003/0077829, US2003/0077829, US2005/0175682, US2008/0020058, US2011/0117125, US2010/0130588, US2016/0376224, and US2017/0119904, the contents of all of which are incorporated herein by reference in their entireties.

[0594] In some embodiments, a PEG-lipid is a compound as defined in US2018/0028664, the contents of which is incorporated herein by reference in its entirety. In some embodiments, a PEG-lipid is disclosed in US20150376115 or in US2016/0376224, the content of both of which is incorporated herein by reference in its entirety.

[0595] The PEG-DAA conjugate can be, for example, PEG-dilauryloxypropyl, PEG-dimyristyloxypropyl, PEG-dipalmityloxypropyl, or PEG-distearyloxypropyl. The PEG-lipid can be one or more of PEG-DMG, PEG-dilaurylglycerol, PEG-dipalmitoylglycerol, PEG-disterylglycerol, PEG-dilaurylglycamide, PEG-dimyristylglycamide, PEG-dipalmitoylglycamide, PEG-disterylglycamide, PEG-cholesterol (1-[8′-(Cholest-5-en-3[beta]-oxy)carboxamido-3′,6′-dioxaoctanyl]carbamoyl-[omega]-methyl-poly(ethylene glycol), PEG-DMB (3,4-Ditetradecoxylbenzyl-[omega]-methyl-poly(ethylene glycol) ether), and 1,2-dimyristoyl-sn-glycero-3-phosphoethanolamine-N-[methoxy(polyethylene glycol)-2000]. In some examples, the PEG-lipid can be selected from the group consisting of PEG-DMG, 1,2-dimyristoyl-sn-glycero-3-phosphoethanolamine-N-[methoxy(polyethylene glycol)-2000],

[0596] Lipids conjugated with a molecule other than a PEG can also be used in place of PEG-lipid. For example, polyoxazoline (POZ)-lipid conjugates, polyamide-lipid conjugates (such as ATTA-lipid conjugates), and cationic-polymer lipid (CPL) conjugates can be used in place of or in addition to the PEG-lipid. Exemplary conjugated lipids, i.e., PEG-lipids, (POZ)-lipid conjugates, ATTA-lipid conjugates and cationic polymer-lipids are described in the International patent application publications WO1996/010392, WO1998/051278, WO2002/087541, WO2005/026372, WO2008/147438, WO2009/086558, WO2012/000104, WO2017/117528, WO2017/099823, WO2015/199952, WO2017/004143, WO2015/095346, WO2012/000104, WO2012/000104, and WO2010/006282, US patent application publications US2003/0077829, US2005/0175682, US2008/0020058, US2011/0117125, US2013/0303587, US2018/0028664, US2015/0376115, US2016/0376224, US2016/0317458, US2013/0303587, US2013/0303587, and US20110123453, and U.S. Pat. Nos. 5,885,613, 6,287,591, 6,320,017, and 6,586,559, the contents of all of which are incorporated herein by reference in their entireties.

[0597] In some embodiments, the one or more additional compound can be a therapeutic agent. The therapeutic agent can be selected from any class suitable for the therapeutic objective. In other words, the therapeutic agent can be selected from any class suitable for the therapeutic objective. In other words, the therapeutic agent can be selected according to the treatment objective and biological action desired. For example, if the ceDNA within the LNP is useful for treating hemophilia A, the additional compound can be an anti-hemophilia A agent (e.g., a chemotherapeutic agent, or other hemophilia A therapy (including, but not limited to, a small molecule or an antibody). In another example, if the LNP containing the ceDNA is useful for treating an infection, the additional compound can be an antimicrobial agent (e.g., an antibiotic or antiviral compound). In yet another example, if the LNP containing the ceDNA is useful for treating an immune disease or disorder, the additional compound can be a compound that modulates an immune response (e.g., an immunosuppressant, immunostimulatory compound, or compound modulating one or more specific immune pathways). In some embodiments, different cocktails of different lipid nanoparticles containing different compounds, such as a ceDNA encoding a different protein or a different compound, such as a therapeutic may be used in the compositions and methods of the disclosure.

[0598] In some embodiments, the additional compound is an immune modulating agent. For example, the additional compound is an immunosuppressant. In some embodiments, the additional compound is immune stimulatory agent. Also provided herein is a pharmaceutical composition comprising the lipid nanoparticle-encapsulated insect-cell produced, or a synthetically produced ceDNA vector for expression of FVIII protein as described herein and a pharmaceutically acceptable carrier or excipient.

[0599] In some aspects, the disclosure provides for a lipid nanoparticle formulation further comprising one or more pharmaceutical excipients. In some embodiments, the lipid nanoparticle formulation further comprises sucrose, tris, trehalose and/or glycine.

[0600] The ceDNA vector can be complexed with the lipid portion of the particle or encapsulated in the lipid position of the lipid nanoparticle. In some embodiments, the ceDNA can be fully encapsulated in the lipid position of the lipid nanoparticle, thereby protecting it from degradation by a nuclease, e.g., in an aqueous solution. In some embodiments, the ceDNA in the lipid nanoparticle is not substantially degraded after exposure of the lipid nanoparticle to a nuclease at 37° C. for at least about 20, 30, 45, or 60 minutes. In some embodiments, the ceDNA in the lipid nanoparticle is not substantially degraded after incubation of the particle in serum at 37° C. for at least about 30, 45, or 60 minutes or at least about 2, 3, 4, 5, 6, 7, 8, 9, 10, 12, 14, 16, 18, 20, 22, 24, 26, 28, 30, 32, 34, or 36 hours.

[0601] In certain embodiments, the lipid nanoparticles are substantially non-toxic to a subject, e.g., to a mammal such as a human. In some aspects, the lipid nanoparticle formulation is a lyophilized powder.

[0602] In some embodiments, lipid nanoparticles are solid core particles that possess at least one lipid bilayer. In other embodiments, the lipid nanoparticles have a non-bilayer structure, i.e., a non-lamellar (i.e., non-bilayer) morphology. Without limitations, the non-bilayer morphology can include, for example, three dimensional tubes, rods, cubic symmetries, etc. For example, the morphology of the lipid nanoparticles (lamellar vs. non-lamellar) can readily be assessed and characterized using, e.g., Cryo-TEM analysis as described in US2010/0130588, the content of which is incorporated herein by reference in its entirety.

[0603] In some further embodiments, the lipid nanoparticles having a non-lamellar morphology are electron dense. In some aspects, the disclosure provides for a lipid nanoparticle that is either unilamellar or multilamellar in structure. In some aspects, the disclosure provides for a lipid nanoparticle formulation that comprises multi-vesicular particles and/or foam-based particles.

[0604] By controlling the composition and concentration of the lipid components, one can control the rate at which the lipid conjugate exchanges out of the lipid particle and, in turn, the rate at which the lipid nanoparticle becomes fusogenic. In addition, other variables including, e.g., pH, temperature, or ionic strength, can be used to vary and/or control the rate at which the lipid nanoparticle becomes fusogenic. Other methods which can be used to control the rate at which the lipid nanoparticle becomes fusogenic will be apparent to those of ordinary skill in the art based on this disclosure. It will also be apparent that by controlling the composition and concentration of the lipid conjugate, one can control the lipid particle size.

[0605] The pKa of formulated cationic lipids can be correlated with the effectiveness of the LNPs for delivery of nucleic acids (see Jayaraman et al., Angewandte Chemie, International Edition (2012), 51(34), 8529-8533; Semple et al., Nature Biotechnology 28, 172-176 (2010), both of which are incorporated by reference in their entirety). The preferred range of pKa is ˜5 to ˜7. The pKa of the cationic lipid can be determined in lipid nanoparticles using an assay based on fluorescence of 2-(p-toluidino)-6-napthalene sulfonic acid (TNS).

### VIII. Methods of Use

[0606] A ceDNA vector for expression of FVIII protein as disclosed herein can also be used in a method for the delivery of a nucleic acid sequence of interest (e.g., encoding FVIII protein) to a target cell (e.g., a host cell). In some embodiments, the method comprises a method for delivering FVIII protein to a cell of a subject in need thereof and treating hemophilia A. The disclosure allows for the in vivo expression of FVIII protein encoded in the ceDNA vector in a cell in a subject such that therapeutic effect of the expression of FVIII protein occurs. These results are seen with both in vivo and in vitro modes of ceDNA vector delivery.

[0607] In addition, the disclosure provides a method for the delivery of FVIII protein in a cell of a subject in need thereof, comprising multiple administrations of the ceDNA vector of the disclosure encoding said FVIII protein. Since the ceDNA vector of the disclosure does not induce an immune response like that typically observed against encapsidated viral vectors, such a multiple administration strategy will likely have greater success in a ceDNA-based system. The ceDNA vector are administered in sufficient amounts to transfect the cells of a desired tissue and to provide sufficient levels of gene transfer and expression of the FVIII protein without undue adverse effects. Conventional and pharmaceutically acceptable routes of administration include, but are not limited to, retinal administration (e.g., subretinal injection, suprachoroidal injection or intravitreal injection), intravenous (e.g., in a liposome formulation), direct delivery to the selected organ (e.g., any one or more tissues selected from: liver, kidneys, gallbladder, prostate, adrenal gland, heart, intestine, lung, and stomach), intramuscular, and other parental routes of administration. Routes of administration may be combined, if desired.

[0608] Delivery of a ceDNA vector for expression of FVIII protein as described herein is not limited to delivery of the expressed FVIII protein. For example, conventionally produced (e.g., using a cell-based production method (e.g., insect-cell production methods) or synthetically produced ceDNA vectors as described herein may be used with other delivery systems provided to provide a portion of the gene therapy. One non-limiting example of a system that may be combined with the ceDNA vectors in accordance with the present disclosure includes systems which separately deliver one or more co-factors or immune suppressors for effective gene expression of the ceDNA vector expressing the FVIII protein.

[0609] The disclosure also provides for a method of treating hemophilia A in a subject comprising introducing into a target cell in need thereof (in particular a muscle cell or tissue) of the subject a therapeutically effective amount of a ceDNA vector, optionally with a pharmaceutically acceptable carrier. While the ceDNA vector can be introduced in the presence of a carrier, such a carrier is not required. The ceDNA vector selected comprises a nucleic acid sequence encoding an FVIII protein useful for treating hemophilia A. In particular, the ceDNA vector may comprise a desired FVIII protein sequence operably linked to control elements capable of directing transcription of the desired FVIII protein encoded by the exogenous DNA sequence when introduced into the subject. The ceDNA vector can be administered via any suitable route as provided above, and elsewhere herein.

[0610] The compositions and vectors provided herein can be used to deliver an FVIII protein for various purposes. In some embodiments, the transgene encodes an FVIII protein that is intended to be used for research purposes, e.g., to create a somatic transgenic animal model harboring the transgene, e.g., to study the function of the FVIII protein product. In another example, the transgene encodes an FVIII protein that is intended to be used to create an animal model of hemophilia A. In some embodiments, the encoded FVIII protein is useful for the treatment or prevention of hemophilia A states in a mammalian subject. The FVIII protein can be transferred (e.g., expressed in) to a patient in a sufficient amount to treat hemophilia A associated with reduced expression, lack of expression or dysfunction of the gene.

[0611] In principle, the expression cassette can include a nucleic acid or any transgene that encodes an FVIII protein that is either reduced or absent due to a mutation or which conveys a therapeutic benefit when overexpressed is considered to be within the scope of the disclosure. Preferably, noninserted bacterial DNA is not present and preferably no bacterial DNA is present in the ceDNA compositions provided herein.

[0612] A ceDNA vector is not limited to one species of ceDNA vector. As such, in another aspect, multiple ceDNA vectors expressing different proteins or the same FVIII protein but operatively linked to different promoters or cis-regulatory elements can be delivered simultaneously or sequentially to the target cell, tissue, organ, or subject. Therefore, this strategy can allow for the gene therapy or gene delivery of multiple proteins simultaneously. It is also possible to separate different portions of a FVIII protein into separate ceDNA vectors (e.g., different domains and/or co-factors required for functionality of a FVIII protein) which can be administered simultaneously or at different times, and can be separately regulatable, thereby adding an additional level of control of expression of a FVIII protein. Delivery can also be performed multiple times and, importantly for gene therapy in the clinical setting, in subsequent increasing or decreasing doses, given the lack of an anti-capsid host immune response due to the absence of a viral capsid. It is anticipated that no anti-capsid response will occur as there is no capsid.

[0613] The disclosure also provides for a method of treating hemophilia A in a subject comprising introducing into a target cell in need thereof (in particular a muscle cell or tissue) of the subject a therapeutically effective amount of a ceDNA vector as disclosed herein, optionally with a pharmaceutically acceptable carrier. While the ceDNA vector can be introduced in the presence of a carrier, such a carrier is not required. The ceDNA vector implemented comprises a nucleic acid sequence of interest useful for treating the hemophilia A. In particular, the ceDNA vector may comprise a desired exogenous DNA sequence operably linked to control elements capable of directing transcription of the desired polypeptide, protein, or oligonucleotide encoded by the exogenous DNA sequence when introduced into the subject. The ceDNA vector can be administered via any suitable route as provided above, and elsewhere herein.

### IX. Methods of Delivering ceDNA Vectors for FVIII Protein Production

[0614] In some embodiments, a ceDNA vector for expression of FVIII protein can be delivered to a target cell in vitro or in vivo by various suitable methods. ceDNA vectors alone can be applied or injected. According to embodiments, ceDNA vectors can be delivered to a cell without the help of a transfection reagent or other physical means. Alternatively, according to other embodiments, ceDNA vectors for expression of FVIII protein can be delivered using any art-known transfection reagent or other art-known physical means that facilitates entry of DNA into a cell, e.g., liposomes, alcohols, polylysine-rich compounds, arginine-rich compounds, calcium phosphate, microvesicles, microinjection, electroporation and the like.

[0615] The ceDNA vectors for expression of FVIII protein as disclosed herein can efficiently target cell and tissue-types that are normally difficult to transduce with conventional AAV virions using various delivery reagent.

[0616] One aspect of the technology described herein relates to a method of delivering an FVIII protein to a cell. Typically, for in vivo and in vitro methods, a ceDNA vector for expression of FVIII protein as disclosed herein may be introduced into the cell using the methods as disclosed herein, as well as other methods known in the art. A ceDNA vector for expression of FVIII protein as disclosed herein are preferably administered to the cell in a biologically-effective amount. If the ceDNA vector is administered to a cell in vivo (e.g., to a subject), a biologically-effective amount of the ceDNA vector is an amount that is sufficient to result in transduction and expression of the FVIII protein in a target cell.

[0617] Exemplary modes of administration of a ceDNA vector for expression of FVIII protein as disclosed herein includes oral, rectal, transmucosal, intranasal, inhalation (e.g., via an aerosol), buccal (e.g., sublingual), vaginal, intrathecal, intraocular, transdermal, intraendothelial, in utero (or in ovo), parenteral (e.g., intravenous, subcutaneous, intradermal, intracranial, intramuscular [including administration to skeletal, diaphragm and/or cardiac muscle], intrapleural, intracerebral, and intraarticular). Administration can be systemically or direct delivery to the liver or elsewhere (e.g., any kidneys, gallbladder, prostate, adrenal gland, heart, intestine, lung, and stomach).

[0618] Administration can be topical (e.g., to both skin and mucosal surfaces, including airway surfaces, and transdermal administration), intralymphatic, and the like, as well as direct tissue or organ injection (e.g., but not limited to, liver, but also to eye, muscles, including skeletal muscle, cardiac muscle, diaphragm muscle, or brain).

[0619] Administration of the ceDNA vector can be to any site in a subject, including, without limitation, a site selected from the group consisting of the liver and/or also eyes, brain, a skeletal muscle, a smooth muscle, the heart, the diaphragm, the airway epithelium, the kidney, the spleen, the pancreas, the skin.

[0620] The most suitable route in any given case will depend on the nature and severity of the condition being treated, ameliorated, and/or prevented and on the nature of the particular ceDNA vector that is being used. Additionally, ceDNA permits one to administer more than one FVIII protein in a single vector, or multiple ceDNA vectors (e.g., a ceDNA cocktail).

A. Intramuscular Administration of a ceDNA Vector

[0621] In some embodiments, a method of treating a disease in a subject comprises introducing into a target cell in need thereof (in particular a muscle cell or tissue) of the subject a therapeutically effective amount of a ceDNA vector encoding an FVIII protein, optionally with a pharmaceutically acceptable carrier. In some embodiments, the ceDNA vector for expression of FVIII protein is administered to a muscle tissue of a subject.

[0622] In some embodiments, administration of the ceDNA vector can be to any site in a subject, including, without limitation, a site selected from the group consisting of a skeletal muscle, a smooth muscle, the heart, the diaphragm, or muscles of the eye.

[0623] Administration of a ceDNA vector for expression of FVIII protein as disclosed herein to a skeletal muscle according to the present disclosure includes but is not limited to administration to the skeletal muscle in the limbs (e.g., upper arm, lower arm, upper leg, and/or lower leg), back, neck, head (e.g., tongue), thorax, abdomen, pelvis/perineum, and/or digits. The ceDNA as disclosed herein vector can be delivered to skeletal muscle by intravenous administration, intra-arterial administration, intraperitoneal administration, limb perfusion, (optionally, isolated limb perfusion of a leg and/or arm; see, e.g., Arruda et al., (2005) Blood 105: 3458-3464), and/or direct intramuscular injection. In particular embodiments, the ceDNA vector as disclosed herein is administered to the liver, eye, a limb (arm and/or leg) of a subject (e.g., a subject with muscular dystrophy such as DMD) by limb perfusion, optionally isolated limb perfusion (e.g., by intravenous or intra-articular administration. In embodiments, the ceDNA vector as disclosed herein can be administered without employing “hydrodynamic” techniques.

[0624] For instance, tissue delivery (e.g., to retina) of conventional viral vectors is often enhanced by hydrodynamic techniques (e.g., intravenous/intravenous administration in a large volume), which increase pressure in the vasculature and facilitate the ability of the viral vector to cross the endothelial cell barrier. In particular embodiments, the ceDNA vectors described herein can be administered in the absence of hydrodynamic techniques such as high volume infusions and/or elevated intravascular pressure (e.g., greater than normal systolic pressure, for example, less than or equal to a 5%, 10%, 15%, 20%, 25% increase in intravascular pressure over normal systolic pressure). Such methods may reduce or avoid the side effects associated with hydrodynamic techniques such as edema, nerve damage and/or compartment syndrome.

[0625] Furthermore, a composition comprising a ceDNA vector for expression of FVIII protein as disclosed herein that is administered to a skeletal muscle can be administered to a skeletal muscle in the limbs (e.g., upper arm, lower arm, upper leg, and/or lower leg), back, neck, head (e.g., tongue), thorax, abdomen, pelvis/perineum, and/or digits. Suitable skeletal muscles include but are not limited to abductor digiti minimi (in the hand), abductor digiti minimi (in the foot), abductor hallucis, abductor ossis metatarsi quinti, abductor pollicis brevis, abductor pollicis longus, adductor brevis, adductor hallucis, adductor longus, adductor magnus, adductor pollicis, anconeus, anterior scalene, articularis genus, biceps brachii, biceps femoris, brachialis, brachioradialis, buccinator, coracobrachialis, corrugator supercilii, deltoid, depressor anguli oris, depressor labii inferioris, digastric, dorsal interossei (in the hand), dorsal interossei (in the foot), extensor carpi radialis brevis, extensor carpi radialis longus, extensor carpi ulnaris, extensor digiti minimi, extensor digitorum, extensor digitorum brevis, extensor digitorum longus, extensor hallucis brevis, extensor hallucis longus, extensor indicis, extensor pollicis brevis, extensor pollicis longus, flexor carpi radialis, flexor carpi ulnaris, flexor digiti minimi brevis (in the hand), flexor digiti minimi brevis (in the foot), flexor digitorum brevis, flexor digitorum longus, flexor digitorum profundus, flexor digitorum superficialis, flexor hallucis brevis, flexor hallucis longus, flexor pollicis brevis, flexor pollicis longus, frontalis, gastrocnemius, geniohyoid, gluteus maximus, gluteus medius, gluteus minimus, gracilis, iliocostalis cervicis, iliocostalis lumborum, iliocostalis thoracis, illiacus, inferior gemellus, inferior oblique, inferior rectus, infraspinatus, interspinalis, intertransversi, lateral pterygoid, lateral rectus, latissimus dorsi, levator anguli oris, levator labii superioris, levator labii superioris alaeque nasi, levator palpebrae superioris, levator scapulae, long rotators, longissimus capitis, longissimus cervicis, longissimus thoracis, longus capitis, longus colli, lumbricals (in the hand), lumbricals (in the foot), masseter, medial pterygoid, medial rectus, middle scalene, multifidus, mylohyoid, obliquus capitis inferior, obliquus capitis superior, obturator externus, obturator internus, occipitalis, omohyoid, opponens digiti minimi, opponens pollicis, orbicularis oculi, orbicularis oris, palmar interossei, palmaris brevis, palmaris longus, pectineus, pectoralis major, pectoralis minor, peroneus brevis, peroneus longus, peroneus tertius, piriformis, plantar interossei, plantaris, platysma, popliteus, posterior scalene, pronator quadratus, pronator teres, psoas major, quadratus femoris, quadratus plantae, rectus capitis anterior, rectus capitis lateralis, rectus capitis posterior major, rectus capitis posterior minor, rectus femoris, rhomboid major, rhomboid minor, risorius, sartorius, scalenus minimus, semimembranosus, semispinalis capitis, semispinalis cervicis, semispinalis thoracis, semitendinosus, serratus anterior, short rotators, soleus, spinalis capitis, spinalis cervicis, spinalis thoracis, splenius capitis, splenius cervicis, sternocleidomastoid, sternohyoid, sternothyroid, stylohyoid, subclavius, subscapularis, superior gemellus, superior oblique, superior rectus, supinator, supraspinatus, temporalis, tensor fascia lata, teres major, teres minor, thoracis, thyrohyoid, tibialis anterior, tibialis posterior, trapezius, triceps brachii, vastus intermedius, vastus lateralis, vastus medialis, zygomaticus major, and zygomaticus minor, and any other suitable skeletal muscle as known in the art.

[0626] Administration of a ceDNA vector for expression of FVIII protein as disclosed herein to diaphragm muscle can be by any suitable method including intravenous administration, intra-arterial administration, and/or intra-peritoneal administration. In some embodiments, delivery of an expressed transgene from the ceDNA vector to a target tissue can also be achieved by delivering a synthetic depot comprising the ceDNA vector, where a depot comprising the ceDNA vector is implanted into skeletal, smooth, cardiac and/or diaphragm muscle tissue or the muscle tissue can be contacted with a film or other matrix comprising the ceDNA vector as described herein. Such implantable matrices or substrates are described in U.S. Pat. No. 7,201,898.

[0627] Administration of a ceDNA vector for expression of FVIII protein as disclosed herein to cardiac muscle includes administration to the left atrium, right atrium, left ventricle, right ventricle and/or septum. The ceDNA vector as described herein can be delivered to cardiac muscle by intravenous administration, intra-arterial administration such as intra-aortic administration, direct cardiac injection (e.g., into left atrium, right atrium, left ventricle, right ventricle), and/or coronary artery perfusion.

[0628] Administration of a ceDNA vector for expression of FVIII protein as disclosed herein to smooth muscle can be by any suitable method including intravenous administration, intra-arterial administration, and/or intra-peritoneal administration. In one embodiment, administration can be to endothelial cells present in, near, and/or on smooth muscle. Non-limiting examples of smooth muscles include the iris of the eye, bronchioles of the lung, laryngeal muscles (vocal cords), muscular layers of the stomach, esophagus, small and large intestine of the gastrointestinal tract, ureter, detrusor muscle of the urinary bladder, uterine myometrium, penis, or prostate gland.

[0629] In some embodiments, of a ceDNA vector for expression of FVIII protein as disclosed herein is administered to skeletal muscle, diaphragm muscle and/or cardiac muscle. In representative embodiments, a ceDNA vector according to the present disclosure is used to treat and/or prevent disorders of skeletal, cardiac and/or diaphragm muscle.

[0630] Specifically, it is contemplated that a composition comprising a ceDNA vector for expression of FVIII protein as disclosed herein can be delivered to one or more muscles of the eye (e.g., Lateral rectus, Medial rectus, Superior rectus, Inferior rectus, Superior oblique, Inferior oblique), facial muscles (e.g., Occipitofrontalis muscle, Temporoparietalis muscle, Procerus muscle, Nasalis muscle, Depressor septi nasi muscle, Orbicularis oculi muscle, Corrugator supercilii muscle, Depressor supercilii muscle, Auricular muscles, Orbicularis oris muscle, Depressor anguli oris muscle, Risorius, Zygomaticus major muscle, Zygomaticus minor muscle, Levator labii superioris, Levator labii superioris alaeque nasi muscle, Depressor labii inferioris muscle, Levator anguli oris, Buccinator muscle, Mentalis) or tongue muscles (e.g., genioglossus, hyoglossus, chondroglossus, styloglossus, palatoglossus, superior longitudinal muscle, inferior longitudinal muscle, the vertical muscle, and the transverse muscle).

[0631] (i) Intramuscular injection: In some embodiments, a composition comprising a ceDNA vector for expression of FVIII protein as disclosed herein can be injected into one or more sites of a given muscle, for example, skeletal muscle (e.g., deltoid, vastus lateralis, ventrogluteal muscle of dorsogluteal muscle, or anterolateral thigh for infants) in a subject using a needle. The composition comprising ceDNA can be introduced to other subtypes of muscle cells. Non-limiting examples of muscle cell subtypes include skeletal muscle cells, cardiac muscle cells, smooth muscle cells and/or diaphragm muscle cells.

[0632] Methods for intramuscular injection are known to those of skill in the art and as such are not described in detail herein. However, when performing an intramuscular injection, an appropriate needle size should be determined based on the age and size of the patient, the viscosity of the composition, as well as the site of injection. Table 19 provides guidelines for exemplary sites of injection and corresponding needle size:

TABLE 19
Guidelines for intramuscular injection in human patients

| | | | Max. vol. of |
|---|---|---|---|
| Injection Site | Needle Gauge | Needle Size | composition |
| Ventrogluteal site | Aqueous solutions: 20- | Thin adult: 15 to 25 mm | 3 mL |
| (gluteus medius and | 25 gauge | Average adult: 25 mm | |
| gluteus minimus) | Viscous or oil-based | Larger adult (over 150 | |
| | solution: 18-21 gauge | lbs): 25 to 38 mm. | |
| | | Children and infants: will | |
| | | require a smaller needle | |
| Vastus lateralis | Aqueous solutions: 20- | Adult: 25 mm to 38 mm | 3 mL |
| | 25 gauge | | |
| | Viscous or oil-based | | |
| | solution: 18-21 gauge | | |
| | Children/infants: 22 to | | |
| | 25 gauge | | |
| Deltoid | 22 to 25 gauge | Males: | 1 mL |
| | | 130-260 lbs: 25 mm | |
| | | Females: | |
| | | <130 lbs: 16 mm | |
| | | 130-200 lbs: 25 mm | |
| | | >200 lbs: 38 mm | |

[0633] In certain embodiments, a ceDNA vector for expression of FVIII protein as disclosed herein is formulated in a small volume, for example, an exemplary volume as outlined in Table 8 for a given subject. In some embodiments, the subject can be administered a general or local anesthetic prior to the injection, if desired. This is particularly desirable if multiple injections are required or if a deeper muscle is injected, rather than the common injection sites noted above.

[0634] In some embodiments, intramuscular injection can be combined with electroporation, delivery pressure or the use of transfection reagents to enhance cellular uptake of the ceDNA vector.

[0635] (ii) Transfection Reagents: In some embodiments, a ceDNA vector for expression of FVIII protein as disclosed herein is formulated in compositions comprising one or more transfection reagents to facilitate uptake of the vectors into myotubes or muscle tissue. Thus, in one embodiment, the nucleic acids described herein are administered to a muscle cell, myotube or muscle tissue by transfection using methods described elsewhere herein.

[0636] (iii) Electroporation: In certain embodiments, a ceDNA vector for expression of FVIII protein as disclosed herein is administered in the absence of a carrier to facilitate entry of ceDNA into the cells, or in a physiologically inert pharmaceutically acceptable carrier (i.e., any carrier that does not improve or enhance uptake of the capsid free, non-viral vectors into the myotubes). In such embodiments, the uptake of the capsid free, non-viral vector can be facilitated by electroporation of the cell or tissue.

[0637] Cell membranes naturally resist the passage of extracellular into the cell cytoplasm. One method for temporarily reducing this resistance is “electroporation”, where electrical fields are used to create pores in cells without causing permanent damage to the cells. These pores are large enough to allow DNA vectors, pharmaceutical drugs, DNA, and other polar compounds to gain access to the interior of the cell. With time, the pores in the cell membrane close and the cell once again becomes impermeable.

[0638] Electroporation can be used in both in vitro and in vivo applications to introduce e.g., exogenous DNA into living cells. In vitro applications typically mix a sample of live cells with the composition comprising e.g., DNA. The cells are then placed between electrodes such as parallel plates and an electrical field is applied to the cell/composition mixture.

[0639] There are a number of methods for in vivo electroporation; electrodes can be provided in various configurations such as, for example, a caliper that grips the epidermis overlying a region of cells to be treated. Alternatively, needle-shaped electrodes may be inserted into the tissue, to access more deeply located cells. In either case, after the composition comprising e.g., nucleic acids are injected into the treatment region, the electrodes apply an electrical field to the region. In some electroporation applications, this electric field comprises a single square wave pulse on the order of 100 to 500 V/cm. of about 10 to 60 ms duration. Such a pulse may be generated, for example, in known applications of the Electro Square Porator T820, made by the BTX Division of Genetronics, Inc.

[0640] Typically, successful uptake of e.g., nucleic acids occurs only if the muscle is electrically stimulated immediately, or shortly after administration of the composition, for example, by injection into the muscle.

[0641] In certain embodiments, electroporation is achieved using pulses of electric fields or using low voltage/long pulse treatment regimens (e.g., using a square wave pulse electroporation system). Exemplary pulse generators capable of generating a pulsed electric field include, for example, the ECM600, which can generate an exponential wave form, and the ElectroSquarePorator (T820), which can generate a square wave form, both of which are available from BTX, a division of Genetronics, Inc. (San Diego, Calif.). Square wave electroporation systems deliver controlled electric pulses that rise quickly to a set voltage, stay at that level for a set length of time (pulse length), and then quickly drop to zero.

[0642] In some embodiments, a local anesthetic is administered, for example, by injection at the site of treatment to reduce pain that may be associated with electroporation of the tissue in the presence of a composition comprising a capsid free, non-viral vector as described herein. In addition, one of skill in the art will appreciate that a dose of the composition should be chosen that minimizes and/or prevents excessive tissue damage resulting in fibrosis, necrosis or inflammation of the muscle.

[0643] (iv) Delivery Pressure: In some embodiments, delivery of a ceDNA vector for expression of FVIII protein as disclosed herein to muscle tissue is facilitated by delivery pressure, which uses a combination of large volumes and rapid injection into an artery supplying a limb (e.g., iliac artery). This mode of administration can be achieved through a variety of methods that involve infusing limb vasculature with a composition comprising a ceDNA vector, typically while the muscle is isolated from the systemic circulation using a tourniquet of vessel clamps. In one method, the composition is circulated through the limb vasculature to permit extravasation into the cells. In another method, the intravascular hydrodynamic pressure is increased to expand vascular beds and increase uptake of the ceDNA vector into the muscle cells or tissue. In one embodiment, the ceDNA composition is administered into an artery.

[0644] (v) Lipid Nanoparticle Compositions: In some embodiments, a ceDNA vector for expression of FVIII protein as disclosed herein for intramuscular delivery are formulated in a composition comprising a liposome as described elsewhere herein.

[0645] (vi) Systemic Administration of a ceDNA Vector targeted to Muscle Tissue: In some embodiments, a ceDNA vector for expression of FVIII protein as disclosed herein is formulated to be targeted to the muscle via indirect delivery administration, where the ceDNA is transported to the muscle as opposed to the liver. Accordingly, the technology described herein encompasses indirect administration of compositions comprising a ceDNA vector for expression of FVIII protein as disclosed herein to muscle tissue, for example, by systemic administration. Such compositions can be administered topically, intravenously (by bolus or continuous infusion), intracellular injection, intratissue injection, orally, by inhalation, intraperitoneally, subcutaneously, intracavity, and can be delivered by peristaltic means, if desired, or by other means known by those skilled in the art. The agent can be administered systemically, for example, by intravenous infusion, if so desired.

[0646] In some embodiments, uptake of a ceDNA vector for expression of FVIII protein as disclosed herein into muscle cells/tissue is increased by using a targeting agent or moiety that preferentially directs the vector to muscle tissue. Thus, in some embodiments, a capsid free, ceDNA vector can be concentrated in muscle tissue as compared to the amount of capsid free ceDNA vectors present in other cells or tissues of the body.

[0647] In some embodiments, the composition comprising a ceDNA vector for expression of FVIII protein as disclosed herein further comprises a targeting moiety to muscle cells. In other embodiments, the expressed gene product comprises a targeting moiety specific to the tissue in which it is desired to act. The targeting moiety can include any molecule, or complex of molecules, which is/are capable of targeting, interacting with, coupling with, and/or binding to an intracellular, cell surface, or extracellular biomarker of a cell or tissue. The biomarker can include, for example, a cellular protease, a kinase, a protein, a cell surface receptor, a lipid, and/or fatty acid. Other examples of biomarkers that the targeting moieties can target, interact with, couple with, and/or bind to include molecules associated with a particular disease. For example, the biomarkers can include cell surface receptors implicated in cancer development, such as epidermal growth factor receptor and transferrin receptor. The targeting moieties can include, but are not limited to, synthetic compounds, natural compounds or products, macromolecular entities, bioengineered molecules (e.g., polypeptides, lipids, polynucleotides, antibodies, antibody fragments), and small entities (e.g., small molecules, neurotransmitters, substrates, ligands, hormones and elemental compounds) that bind to molecules expressed in the target muscle tissue.

[0648] In certain embodiments, the targeting moiety may further comprise a receptor molecule, including, for example, receptors, which naturally recognize a specific desired molecule of a target cell. Such receptor molecules include receptors that have been modified to increase their specificity of interaction with a target molecule, receptors that have been modified to interact with a desired target molecule not naturally recognized by the receptor, and fragments of such receptors (see, e.g., Skerra, 2000, J. Molecular Recognition, 13:167-187). A preferred receptor is a chemokine receptor. Exemplary chemokine receptors have been described in, for example, Lapidot et al, 2002, Exp Hematol, 30:973-81 and Onuffer et al., 2002, Trends Pharmacol Sci, 23:459-67.

[0649] In other embodiments, the additional targeting moiety may comprise a ligand molecule, including, for example, ligands which naturally recognize a specific desired receptor of a target cell, such as a Transferrin (Tf) ligand. Such ligand molecules include ligands that have been modified to increase their specificity of interaction with a target receptor, ligands that have been modified to interact with a desired receptor not naturally recognized by the ligand, and fragments of such ligands.

[0650] In still other embodiments, the targeting moiety may comprise an aptamer. Aptamers are oligonucleotides that are selected to bind specifically to a desired molecular structure of the target cell. Aptamers typically are the products of an affinity selection process similar to the affinity selection of phage display (also known as in vitro molecular evolution). The process involves performing several tandem iterations of affinity separation, e.g., using a solid support to which the diseased immunogen is bound, followed by polymerase chain reaction (PCR) to amplify nucleic acids that bound to the immunogens. Each round of affinity separation thus enriches the nucleic acid population for molecules that successfully bind the desired immunogen. In this manner, a random pool of nucleic acids may be “educated” to yield aptamers that specifically bind target molecules. Aptamers typically are RNA, but may be DNA or analogs or derivatives thereof, such as, without limitation, peptide nucleic acids (PNAs) and phosphorothioate nucleic acids.

[0651] In some embodiments, the targeting moiety can comprise a photo-degradable ligand (i.e., a ‘caged’ ligand) that is released, for example, from a focused beam of light such that the capsid free, non-viral vectors or the gene product are targeted to a specific tissue.

[0652] It is also contemplated herein that the compositions be delivered to multiple sites in one or more muscles of the subject. That is, injections can be in at least 2, at least 3, at least 4, at least 5, at least 6, at least 7, at least 8, at least 9, at least 10, at least 15, at least 20, at least 25, at least 30, at least 35, at least 40, at least 45, at least 50, at least 55, at least 60, at least 65, at least 70, at least 75, at least 80, at least 85, at least 90, at least 95, at least 100 injections sites. Such sites can be spread over the area of a single muscle or can be distributed among multiple muscles.

B. Administration of the ceDNA Vector for Expression of FVIII Protein to Non-Muscle Locations

[0653] In another embodiment, a ceDNA vector for expression of FVIII protein is administered to the liver. The ceDNA vector may also be administered to different regions of the eye such as the cornea and/or optic nerve The ceDNA vector may also be introduced into the spinal cord, brainstem (medulla oblongata, pons), midbrain (hypothalamus, thalamus, epithalamus, pituitary gland, substantia nigra, pineal gland), cerebellum, telencephalon (corpus striatum, cerebrum including the occipital, temporal, parietal and frontal lobes, cortex, basal ganglia, hippocampus and portaamygdala), limbic system, neocortex, corpus striatum, cerebrum, and inferior colliculus. The ceDNA vector may be delivered into the cerebrospinal fluid (e.g., by lumbar puncture). The ceDNA vector for expression of FVIII protein may further be administered intravascularly to the CNS in situations in which the blood-brain barrier has been perturbed (e.g., brain tumor or cerebral infarct).

[0654] In some embodiments, the ceDNA vector for expression of FVIII protein can be administered to the desired region(s) of the eye by any route known in the art, including but not limited to, intrathecal, intra-ocular, intracerebral, intraventricular, intravenous (e.g., in the presence of a sugar such as mannitol), intranasal, intra-aural, intra-ocular (e.g., intra-vitreous, sub-retinal, anterior chamber) and peri-ocular (e.g., sub-Tenon's region) delivery as well as intramuscular delivery with retrograde delivery to motor neurons.

[0655] In some embodiments, the ceDNA vector for expression of FVIII protein is administered in a liquid formulation by direct injection (e.g., stereotactic injection) to the desired region or compartment in the CNS. In other embodiments, the ceDNA vector can be provided by topical application to the desired region or by intra-nasal administration of an aerosol formulation. Administration to the eye may be by topical application of liquid droplets. As a further alternative, the ceDNA vector can be administered as a solid, slow-release formulation (see, e.g., U.S. Pat. No. 7,201,898). In yet additional embodiments, the ceDNA vector can used for retrograde transport to treat, ameliorate, and/or prevent diseases and disorders involving motor neurons (e.g., amyotrophic lateral sclerosis (ALS); spinal muscular atrophy (SMA), etc.). For example, the ceDNA vector can be delivered to muscle tissue from which it can migrate into neurons.

### C. Ex Vivo Treatment

[0656] In some embodiments, cells are removed from a subject, a ceDNA vector for expression of FVIII protein as disclosed herein is introduced therein, and the cells are then replaced back into the subject. Methods of removing cells from subject for treatment ex vivo, followed by introduction back into the subject are known in the art (see, e.g., U.S. Pat. No. 5,399,346; the disclosure of which is incorporated herein in its entirety). Alternatively, a ceDNA vector is introduced into cells from another subject, into cultured cells, or into cells from any other suitable source, and the cells are administered to a subject in need thereof.

[0657] Cells transduced with a ceDNA vector for expression of FVIII protein as disclosed herein are preferably administered to the subject in a “therapeutically-effective amount” in combination with a pharmaceutical carrier. Those skilled in the art will appreciate that the therapeutic effects need not be complete or curative, as long as some benefit is provided to the subject.

[0658] In some embodiments, a ceDNA vector for expression of FVIII protein as disclosed herein can encode an FVIII protein as described herein (sometimes called a transgene or heterologous nucleic acid sequence) that is to be produced in a cell in vitro, ex vivo, or in vivo. For example, in contrast to the use of the ceDNA vectors described herein in a method of treatment as discussed herein, in some embodiments a ceDNA vector for expression of FVIII protein may be introduced into cultured cells and the expressed FVIII protein isolated from the cells, e.g., for the production of antibodies and fusion proteins. In some embodiments, the cultured cells comprising a ceDNA vector for expression of FVIII protein as disclosed herein can be used for commercial production of antibodies or fusion proteins, e.g., serving as a cell source for small or large scale biomanufacturing of antibodies or fusion proteins. In alternative embodiments, a ceDNA vector for expression of FVIII protein as disclosed herein is introduced into cells in a host non-human subject, for in vivo production of antibodies or fusion proteins, including small scale production as well as for commercial large scale FVIII protein production.

[0659] The ceDNA vectors for expression of FVIII protein as disclosed herein can be used in both veterinary and medical applications. Suitable subjects for ex vivo gene delivery methods as described above include both avians (e.g., chickens, ducks, geese, quail, turkeys and pheasants) and mammals (e.g., humans, bovines, ovines, caprines, equines, felines, canines, and lagomorphs), with mammals being preferred. Human subjects are most preferred. Human subjects include neonates, infants, juveniles, and adults.

### D. Dose Ranges

[0660] Provided herein are methods of treatment comprising administering to the subject an effective amount of a composition comprising a ceDNA vector encoding an FVIII protein as described herein. As will be appreciated by a skilled practitioner, the term “effective amount” refers to the amount of the ceDNA composition administered that results in expression of the FVIII protein in a “therapeutically effective amount” for the treatment of hemophilia A.

[0661] In vivo and/or in vitro assays can optionally be employed to help identify optimal dosage ranges for use. The precise dose to be employed in the formulation will also depend on the route of administration, and the seriousness of the condition, and should be decided according to the judgment of the person of ordinary skill in the art and each subject's circumstances. Effective doses can be extrapolated from dose-response curves derived from in vitro or animal model test systems.

[0662] A ceDNA vectors for expression of FVIII protein as disclosed herein is administered in sufficient amounts to transfect the cells of a desired tissue and to provide sufficient levels of gene transfer and expression without undue adverse effects. Conventional and pharmaceutically acceptable routes of administration include, but are not limited to, those described above in the “Administration” section, such as direct delivery to the selected organ (e.g., intraportal delivery to the liver), oral, inhalation (including intranasal and intratracheal delivery), intraocular, intravenous, intramuscular, subcutaneous, intradermal, intratumoral, and other parental routes of administration. Routes of administration can be combined, if desired.

[0663] The dose of the amount of a ceDNA vectors for expression of FVIII protein as disclosed herein required to achieve a particular “therapeutic effect,” will vary based on several factors including, but not limited to: the route of nucleic acid administration, the level of gene or RNA expression required to achieve a therapeutic effect, the specific disease or disorder being treated, and the stability of the gene(s), RNA product(s), or resulting expressed protein(s). One of skill in the art can readily determine a ceDNA vector dose range to treat a patient having a particular disease or disorder based on the aforementioned factors, as well as other factors that are well known in the art.

[0664] Dosage regime can be adjusted to provide the optimum therapeutic response. For example, the oligonucleotide can be repeatedly administered, e.g., several doses can be administered daily, or the dose can be proportionally reduced as indicated by the exigencies of the therapeutic situation. One of ordinary skill in the art will readily be able to determine appropriate doses and schedules of administration of the subject oligonucleotides, whether the oligonucleotides are to be administered to cells or to subjects.

[0665] A “therapeutically effective dose” will fall in a relatively broad range that can be determined through clinical trials and will depend on the particular application (neural cells will require very small amounts, while systemic injection would require large amounts). For example, for direct in vivo injection into skeletal or cardiac muscle of a human subject, a therapeutically effective dose will be on the order of from about 1 μg to 100 g of the ceDNA vector. If exosomes or microparticles are used to deliver the ceDNA vector, then a therapeutically effective dose can be determined experimentally, but is expected to deliver from 1 μg to about 100 g of vector. Moreover, a therapeutically effective dose is an amount ceDNA vector that expresses a sufficient amount of the transgene to have an effect on the subject that results in a reduction in one or more symptoms of the disease, but does not result in significant off-target or significant adverse side effects. In one embodiment, a “therapeutically effective amount” is an amount of an expressed FVIII protein that is sufficient to produce a statistically significant, measurable change in expression of hemophilia A biomarker or reduction of a given disease symptom. Such effective amounts can be gauged in clinical trials as well as animal studies for a given ceDNA vector composition.

[0666] Formulation of pharmaceutically acceptable excipients and carrier solutions is well-known to those of skill in the art, as is the development of suitable dosing and treatment regimens for using the particular compositions described herein in a variety of treatment regimens.

[0667] For in vitro transfection, an effective amount of a ceDNA vectors for expression of FVIII protein as disclosed herein to be delivered to cells (1×10⁶ cells) will be on the order of 0.1 to 100 μg ceDNA vector, preferably 1 to 20 μg, and more preferably 1 to 15 μg or 8 to 10 μg. Larger ceDNA vectors will require higher doses. If exosomes or microparticles are used, an effective in vitro dose can be determined experimentally but would be intended to deliver generally the same amount of the ceDNA vector.

[0668] For the treatment of hemophilia A, the appropriate dosage of a ceDNA vector that expresses an FVIII protein as disclosed herein will depend on the specific type of disease to be treated, the type of a FVIII protein, the severity and course of the hemophilia A disease, previous therapy, the patient's clinical history and response to the antibody, and the discretion of the attending physician. The ceDNA vector encoding a FVIII protein is suitably administered to the patient at one time or over a series of treatments. Various dosing schedules including, but not limited to, single or multiple administrations over various time-points, bolus administration, and pulse infusion are contemplated herein.

[0669] Depending on the type and severity of the disease, a ceDNA vector is administered in an amount that the encoded FVIII protein is expressed at about 0.3 mg/kg to 100 mg/kg (e.g., 15 mg/kg-100 mg/kg, or any dosage within that range), by one or more separate administrations, or by continuous infusion. One typical daily dosage of the ceDNA vector is sufficient to result in the expression of the encoded FVIII protein at a range from about 15 mg/kg to 100 mg/kg or more, depending on the factors mentioned above. One exemplary dose of the ceDNA vector is an amount sufficient to result in the expression of the encoded FVIII protein as disclosed herein in a range from about 10 mg/kg to about 50 mg/kg. Thus, one or more doses of a ceDNA vector in an amount sufficient to result in the expression of the encoded FVIII protein at about 0.5 mg/kg, 1 mg/kg, 1.5 mg/kg, 2.0 mg/kg, 3 mg/kg, 4.0 mg/kg, 5 mg/kg, 10 mg/kg, 15 mg/kg, 20 mg/kg, 25 mg/kg, 30 mg/kg, 35 mg/kg, 40 mg/kg, 50 mg/kg, 60 mg/kg, 70 mg/kg, 80 mg/kg, 90 mg/kg, or 100 mg/kg (or any combination thereof) may be administered to the patient. In some embodiments, the ceDNA vector is an amount sufficient to result in the expression of the encoded FVIII protein for a total dose in the range of 50 mg to 2500 mg. An exemplary dose of a ceDNA vector is an amount sufficient to result in the total expression of the encoded FVIII protein at about 50 mg, about 100 mg, 200 mg, 300 mg, 400 mg, about 500 mg, about 600 mg, about 700 mg, about 720 mg, about 1000 mg, about 1050 mg, about 1100 mg, about 1200 mg, about 1300 mg, about 1400 mg, about 1500 mg, about 1600 mg, about 1700 mg, about 1800 mg, about 1900 mg, about 2000 mg, about 2050 mg, about 2100 mg, about 2200 mg, about 2300 mg, about 2400 mg, or about 2500 mg (or any combination thereof). As the expression of the FVIII protein from ceDNA vector can be carefully controlled by regulatory switches herein, or alternatively multiple dose of the ceDNA vector administered to the subject, the expression of the FVIII protein from the ceDNA vector can be controlled in such a way that the doses of the expressed FVIII protein may be administered intermittently, e.g., every week, every two weeks, every three weeks, every four weeks, every month, every two months, every three months, or every six months from the ceDNA vector. The progress of this therapy can be monitored by conventional techniques and assays.

[0670] In certain embodiments, a ceDNA vector is administered an amount sufficient to result in the expression of the encoded FVIII protein at a dose of 15 mg/kg, 30 mg/kg, 40 mg/kg, 45 mg/kg, 50 mg/kg, 60 mg/kg or a flat dose, e.g., 300 mg, 500 mg, 700 mg, 800 mg, or higher. In some embodiments, the expression of the FVIII protein from the ceDNA vector is controlled such that the FVIII protein is expressed every day, every other day, every week, every 2 weeks or every 4 weeks for a period of time. In some embodiments, the expression of the FVIII protein from the ceDNA vector is controlled such that the FVIII protein is expressed every 2 weeks or every 4 weeks for a period of time. In certain embodiments, the period of time is 6 months, one year, eighteen months, two years, five years, ten years, 15 years, 20 years, or the lifetime of the patient.

[0671] Treatment can involve administration of a single dose or multiple doses. In some embodiments, more than one dose can be administered to a subject; in fact, multiple doses can be administered as needed, because the ceDNA vector elicits does not elicit an anti-capsid host immune response due to the absence of a viral capsid. As such, one of skill in the art can readily determine an appropriate number of doses. The number of doses administered can, for example, be on the order of 1-100, preferably 2-20 doses.

[0672] Without wishing to be bound by any particular theory, the lack of typical anti-viral immune response elicited by administration of a ceDNA vector as described by the disclosure (i.e., the absence of capsid components) allows the ceDNA vector for expression of FVIII protein to be administered to a host on multiple occasions. In some embodiments, the number of occasions in which a nucleic acid is delivered to a subject is in a range of 2 to 10 times (e.g., 2, 3, 4, 5, 6, 7, 8, 9, or 10 times). In some embodiments, a ceDNA vector is delivered to a subject more than 10 times.

In some embodiments, a dose of a ceDNA vector for expression of FVIII protein as disclosed herein is administered to a subject no more than once per calendar day (e.g., a 24-hour period). In some embodiments, a dose of a ceDNA vector is administered to a subject no more than once per 2, 3, 4, 5, 6, or 7 calendar days. In some embodiments, a dose of a ceDNA vector for expression of FVIII protein as disclosed herein is administered to a subject no more than once per calendar week (e.g., 7 calendar days). In some embodiments, a dose of a ceDNA vector is administered to a subject no more than bi-weekly (e.g., once in a two calendar week period). In some embodiments, a dose of a ceDNA vector is administered to a subject no more than once per calendar month (e.g., once in 30 calendar days). In some embodiments, a dose of a ceDNA vector is administered to a subject no more than once per six calendar months. In some embodiments, a dose of a ceDNA vector is administered to a subject no more than once per calendar year (e.g., 365 days or 366 days in a leap year). In particular embodiments, more than one administration (e.g., two, three, four or more administrations) of a ceDNA vector for expression of FVIII protein as disclosed herein may be employed to achieve the desired level of gene expression over a period of various intervals, e.g., daily, weekly, monthly, yearly, etc.

[0673] Administration of the ceDNA compositions described herein can be repeated for a limited period of time. In some embodiments, the doses are given periodically or by pulsed administration. In a preferred embodiment, the doses recited above are administered over several months. The duration of treatment depends upon the subject's clinical progress and responsiveness to therapy. Booster treatments over time are contemplated. Further, the level of expression can be titrated as the subject grows.

[0674] An FVIII therapeutic protein can be expressed in a subject for at least 1 week, at least 2 weeks, at least 1 month, at least 2 months, at least 6 months, at least 12 months/one year, at least 2 years, at least 5 years, at least 10 years, at least 15 years, at least 20 years, at least 30 years, at least 40 years, at least 50 years or more. Long-term expression can be achieved by repeated administration of the ceDNA vectors described herein at predetermined or desired intervals.

[0675] In some embodiments, a therapeutic a FVIII protein encoded by a ceDNA vector as disclosed herein can be regulated by a regulatory switch, inducible or repressible promotor so that it is expressed in a subject for at least 1 hour, at least 2 hours, at least 5 hours, at least 10 hours, at least 12 hours, at least 18 hours, at least 24 hours, at least 36 hours, at least 48 hours, at least 72 hours, at least 1 week, at least 2 weeks, at least 1 month, at least 2 months, at least 6 months, at least 12 months/one year, at least 2 years, at least 5 years, at least 10 years, at least 15 years, at least 20 years, at least 30 years, at least 40 years, at least 50 years or more. In one embodiment, the expression can be achieved by repeated administration of the ceDNA vectors described herein at predetermined or desired intervals. Alternatively, a ceDNA vector for expression of FVIII protein as disclosed herein can further comprise components of a gene editing system (e.g., CRISPR/Cas, TALENs, zinc finger endonucleases etc.) to permit insertion of the one or more nucleic acid sequences encoding the FVIII protein for substantially permanent treatment or “curing” the disease. Such ceDNA vectors comprising gene editing components are disclosed in International Application PCT/US18/64242, and can include the 5′ and 3′ homology arms (e.g., SEQ ID NO: 151-154, or sequences with at least 40%, 50%, 60%, 70% or 80% homology thereto) for insertion of the nucleic acid encoding the a FVIII protein into safe harbor regions, such as, but not including albumin gene or CCR5 gene. By way of example, a ceDNA vector expressing a FVIII protein can comprise at least one genomic safe harbor (GSH)-specific homology arms for insertion of the FVIII transgene into a genomic safe harbor is disclosed in International Patent Application PCT/US2019/020225, filed on Mar. 1, 2019, which is incorporated herein in its entirety by reference.

[0676] The duration of treatment depends upon the subject's clinical progress and responsiveness to therapy. Continuous, relatively low maintenance doses are contemplated after an initial higher therapeutic dose.

### E. Unit Dosage Forms

[0677] In some embodiments, the pharmaceutical compositions comprising a ceDNA vector for expression of FVIII protein as disclosed herein can conveniently be presented in unit dosage form. A unit dosage form will typically be adapted to one or more specific routes of administration of the pharmaceutical composition. In some embodiments, the unit dosage form is adapted for droplets to be administered directly to the eye. In some embodiments, the unit dosage form is adapted for administration by inhalation. In some embodiments, the unit dosage form is adapted for administration by a vaporizer. In some embodiments, the unit dosage form is adapted for administration by a nebulizer. In some embodiments, the unit dosage form is adapted for administration by an aerosolizer. In some embodiments, the unit dosage form is adapted for oral administration, for buccal administration, or for sublingual administration. In some embodiments, the unit dosage form is adapted for intravenous, intramuscular, or subcutaneous administration. In some embodiments, the unit dosage form is adapted for subretinal injection, suprachoroidal injection or intravitreal injection.

[0678] In some embodiments, the unit dosage form is adapted for intrathecal or intracerebroventricular administration. In some embodiments, the pharmaceutical composition is formulated for topical administration. The amount of active ingredient which can be combined with a carrier material to produce a single dosage form will generally be that amount of the compound which produces a therapeutic effect.

### X. Methods of Treatment

[0679] The technology described herein also demonstrates methods for making, as well as methods of using the disclosed ceDNA vectors for expression of FVIII protein in a variety of ways, including, for example, ex vivo, ex situ, in vitro and in vivo applications, methodologies, diagnostic procedures, and/or gene therapy regimens.

[0680] In one embodiment, the expressed therapeutic FVIII protein expressed from a ceDNA vector as disclosed herein is functional for the treatment of disease. In a preferred embodiment, the therapeutic FVIII protein does not cause an immune system reaction, unless so desired.

[0681] Provided herein is a method of treating hemophilia A in a subject comprising introducing into a target cell in need thereof (for example, a muscle cell or tissue, or other affected cell type) of the subject a therapeutically effective amount of a ceDNA vector for expression of FVIII protein as disclosed herein, optionally with a pharmaceutically acceptable carrier. While the ceDNA vector can be introduced in the presence of a carrier, such a carrier is not required. The ceDNA vector implemented comprises a nucleic acid sequence encoding an FVIII protein as described herein useful for treating the disease. In particular, a ceDNA vector for expression of FVIII protein as disclosed herein may comprise a desired FVIII protein DNA sequence operably linked to control elements capable of directing transcription of the desired FVIII protein encoded by the exogenous DNA sequence when introduced into the subject. The ceDNA vector for expression of FVIII protein as disclosed herein can be administered via any suitable route as provided above, and elsewhere herein.

[0682] Disclosed herein are ceDNA vector compositions and formulations for expression of FVIII protein as disclosed herein that include one or more of the ceDNA vectors of the present disclosure together with one or more pharmaceutically-acceptable buffers, diluents, or excipients. Such compositions may be included in one or more diagnostic or therapeutic kits, for diagnosing, preventing, treating or ameliorating one or more symptoms of hemophilia A. In one aspect the disease, injury, disorder, trauma or dysfunction is a human disease, injury, disorder, trauma or dysfunction.

[0683] Another aspect of the technology described herein provides a method for providing a subject in need thereof with a diagnostically- or therapeutically-effective amount of a ceDNA vector for expression of FVIII protein as disclosed herein, the method comprising providing to a cell, tissue or organ of a subject in need thereof, an amount of the ceDNA vector as disclosed herein; and for a time effective to enable expression of the FVIII protein from the ceDNA vector thereby providing the subject with a diagnostically- or a therapeutically-effective amount of the FVIII protein expressed by the ceDNA vector. In a further aspect, the subject is human.

[0684] Another aspect of the technology described herein provides a method for diagnosing, preventing, treating, or ameliorating at least one or more symptoms of hemophilia A, a disorder, a dysfunction, an injury, an abnormal condition, or trauma in a subject. In an overall and general sense, the method includes at least the step of administering to a subject in need thereof one or more of the disclosed ceDNA vector for FVIII protein production, in an amount and for a time sufficient to diagnose, prevent, treat or ameliorate the one or more symptoms of the disease, disorder, dysfunction, injury, abnormal condition, or trauma in the subject. In such an embodiment, the subject can be evaluated for efficacy of the FVIII protein, or alternatively, detection of the FVIII protein or tissue location (including cellular and subcellular location) of the FVIII protein in the subject. As such, the ceDNA vector for expression of FVIII protein as disclosed herein can be used as an in vivo diagnostic tool, e.g., for the detection of cancer or other indications. In a further aspect, the subject is human.

[0685] Another aspect is use of a ceDNA vector for expression of FVIII protein as disclosed herein as a tool for treating or reducing one or more symptoms of hemophilia A or disease states. There are a number of inherited diseases in which defective genes are known, and typically fall into two classes: deficiency states, usually of enzymes, which are generally inherited in a recessive manner, and unbalanced states, which may involve regulatory or structural proteins, and which are typically but not always inherited in a dominant manner. For unbalanced disease states, a ceDNA vector for expression of FVIII protein as disclosed herein can be used to create hemophilia A state in a model system, which could then be used in efforts to counteract the disease state. Thus, the ceDNA vector for expression of FVIII protein as disclosed herein permit the treatment of genetic diseases. As used herein, hemophilia A state is treated by partially or wholly remedying the deficiency or imbalance that causes the disease or makes it more severe.

[0686] As used herein, the term “therapeutically effective amount” is an amount of an expressed FVIII therapeutic protein, or functional fragment thereof that is sufficient to produce a statistically significant, measurable change in expression of a disease biomarker or reduction in a given disease symptom (see “Efficacy Measurement” below). Such effective amounts can be gauged in clinical trials as well as animal studies for a given ceDNA composition.

[0687] The efficacy of a given treatment for hemophilia A, can be determined by the skilled clinician. However, a treatment is considered “effective treatment,” as the term is used herein, if any one or all of the signs or symptoms of the disease or disorder is/are altered in a beneficial manner, or other clinically accepted symptoms or markers of disease are improved, or ameliorated, e.g., by at least 10% following treatment with a ceDNA vector encoding FVIII, or a functional fragment thereof. Efficacy can also be measured by failure of an individual to worsen as assessed by stabilization of the disease, or the need for medical interventions (i.e., progression of the disease is halted or at least slowed). Methods of measuring these indicators are known to those of skill in the art and/or described herein. Treatment includes any treatment of a disease in an individual or an animal (some non-limiting examples include a human, or a mammal) and includes: (1) inhibiting the disease, e.g., arresting, or slowing progression of the disease or disorder; or (2) relieving the disease, e.g., causing regression of symptoms; and (3) preventing or reducing the likelihood of the development of the disease, or preventing secondary diseases/disorders associated with the disease, such as liver or kidney failure. An effective amount for the treatment of a disease means that amount which, when administered to a mammal in need thereof, is sufficient to result in effective treatment as that term is defined herein, for that disease.

[0688] Efficacy of an agent can be determined by assessing physical indicators that are particular to hemophilia A. Standard methods of analysis of hemophilia A indicators are known in the art.

### A. Host Cells

[0689] In some embodiments, a ceDNA vector for expression of FVIII protein as disclosed herein delivers the FVIII protein transgene into a subject host cell. In some embodiments, the cells are photoreceptor cells. In some embodiments, the cells are RPE cells. In some embodiments, the subject host cell is a human host cell, including, for example blood cells, stem cells, hematopoietic cells, CD34⁺ cells, liver cells, cancer cells, vascular cells, muscle cells, pancreatic cells, neural cells, ocular or retinal cells, epithelial or endothelial cells, dendritic cells, fibroblasts, or any other cell of mammalian origin, including, without limitation, hepatic (i.e., liver) cells, lung cells, cardiac cells, pancreatic cells, intestinal cells, diaphragmatic cells, renal (i.e., kidney) cells, neural cells, blood cells, bone marrow cells, or any one or more selected tissues of a subject for which gene therapy is contemplated. In one aspect, the subject host cell is a human host cell.

[0690] The present disclosure also relates to recombinant host cells as mentioned above, including a ceDNA vector for expression of FVIII protein as disclosed herein. Thus, one can use multiple host cells depending on the purpose as is obvious to the skilled artisan. A construct or a ceDNA vector for expression of FVIII protein as disclosed herein including donor sequence is introduced into a host cell so that the donor sequence is maintained as a chromosomal integrant as described earlier. The term host cell encompasses any progeny of a parent cell that is not identical to the parent cell due to mutations that occur during replication. The choice of a host cell will to a large extent depend upon the donor sequence and its source.

[0691] The host cell may also be a eukaryote, such as a mammalian, insect, plant, or fungal cell. In one embodiment, the host cell is a human cell (e.g., a primary cell, a stem cell, or an immortalized cell line). In some embodiments, the host cell can be administered a ceDNA vector for expression of FVIII protein as disclosed herein ex vivo and then delivered to the subject after the gene therapy event. A host cell can be any cell type, e.g., a somatic cell or a stem cell, an induced pluripotent stem cell, or a blood cell, e.g., T-cell or B-cell, or bone marrow cell. In certain embodiments, the host cell is an allogenic cell. For example, T-cell genome engineering is useful for cancer immunotherapies, disease modulation such as HIV therapy (e.g., receptor knock out, such as CXCR4 and CCR5) and immunodeficiency therapies. MHC receptors on B-cells can be targeted for immunotherapy. In some embodiments, gene modified host cells, e.g., bone marrow stem cells, e.g., CD34⁺ cells, or induced pluripotent stem cells can be transplanted back into a patient for expression of a therapeutic protein.

### B. Additional Diseases for Gene Therapy:

[0692] In general, a ceDNA vector for expression of FVIII protein as disclosed herein can be used to deliver any FVIII protein in accordance with the description above to treat, prevent, or ameliorate the symptoms associated with hemophilia A related to an aberrant protein expression or gene expression in a subject.

[0693] In some embodiments, a ceDNA vector for expression of FVIII protein as disclosed herein can be used to deliver an FVIII protein to skeletal, cardiac or diaphragm muscle, for production of an FVIII protein for secretion and circulation in the blood or for systemic delivery to other tissues to treat, ameliorate, and/or prevent hemophilia A.

[0694] The a ceDNA vector for expression of FVIII protein as disclosed herein can be administered to the lungs of a subject by any suitable means, optionally by administering an aerosol suspension of respirable particles comprising the ceDNA vectors, which the subject inhales. The respirable particles can be liquid or solid. Aerosols of liquid particles comprising the ceDNA vectors may be produced by any suitable means, such as with a pressure-driven aerosol nebulizer or an ultrasonic nebulizer, as is known to those of skill in the art. See, e.g., U.S. Pat. No. 4,501,729. Aerosols of solid particles comprising the ceDNA vectors may likewise be produced with any solid particulate medicament aerosol generator, by techniques known in the pharmaceutical art.

[0695] In some embodiments, a ceDNA vector for expression of FVIII protein as disclosed herein can be administered to tissues of the CNS (e.g., brain, eye).

[0696] Ocular disorders that may be treated, ameliorated, or prevented with a ceDNA vector for expression of FVIII protein as disclosed herein include ophthalmic disorders involving the retina, posterior tract, and optic nerve (e.g., retinitis pigmentosa, diabetic retinopathy and other retinal degenerative diseases, uveitis, age-related macular degeneration, glaucoma). Many ophthalmic diseases and disorders are associated with one or more of three types of indications: (1) angiogenesis, (2) inflammation, and (3) degeneration. In some embodiments, the ceDNA vector as disclosed herein can be employed to deliver anti-angiogenic factors; anti-inflammatory factors; factors that retard cell degeneration, promote cell sparing, or promote cell growth and combinations of the foregoing. Diabetic retinopathy, for example, is characterized by angiogenesis. Diabetic retinopathy can be treated by delivering one or more anti-angiogenic antibodies or fusion proteins either intraocularly (e.g., in the vitreous) or periocularly (e.g., in the sub-Tenon's region). Additional ocular diseases that may be treated, ameliorated, or prevented with the ceDNA vectors of the disclosure include geographic atrophy, vascular or “wet” macular degeneration, PKU, Leber Congenital Amaurosis (LCA), Usher syndrome, pseudoxanthoma elasticum (PXE), x-linked retinitis pigmentosa (XLRP), x-linked retinoschisis (XLRS), Choroideremia, Leber hereditary optic neuropathy (LHON), Archomatopsia, cone-rod dystrophy, Fuchs endothelial corneal dystrophy, diabetic macular edema and ocular cancer and tumors.

[0697] In some embodiments, inflammatory ocular diseases or disorders (e.g., uveitis) can be treated, ameliorated, or prevented by a ceDNA vector for expression of FVIII protein as disclosed herein. One or more anti-inflammatory antibodies or fusion proteins can be expressed by intraocular (e.g., vitreous or anterior chamber) administration of the ceDNA vector as disclosed herein. In some embodiments, a ceDNA vector for expression of FVIII protein as disclosed herein can encode an FVIII protein that is associated with transgene encoding a reporter polypeptide (e.g., an enzyme such as Green Fluorescent Protein, or alkaline phosphatase). In some embodiments, a transgene that encodes a reporter protein useful for experimental or diagnostic purposes, is selected from any of: β-lactamase, β-galactosidase (LacZ), alkaline phosphatase, thymidine kinase, green fluorescent protein (GFP), chloramphenicol acetyltransferase (CAT), luciferase, and others well known in the art. In some aspects, ceDNA vectors expressing an FVIII protein linked to a reporter polypeptide may be used for diagnostic purposes, as well as to determine efficacy or as markers of the ceDNA vector's activity in the subject to which they are administered.

C. Testing for Successful Gene Expression Using a ceDNA Vector

[0698] Assays well known in the art can be used to test the efficiency of gene delivery of an FVIII protein by a ceDNA vector can be performed in both in vitro and in vivo models. Levels of the expression of the FVIII protein by ceDNA can be assessed by one skilled in the art by measuring mRNA and protein levels of the FVIII protein (e.g., reverse transcription PCR, western blot analysis, and enzyme-linked immunosorbent assay (ELISA)). In one embodiment, ceDNA comprises a reporter protein that can be used to assess the expression of the FVIII protein, for example by examining the expression of the reporter protein by fluorescence microscopy or a luminescence plate reader. For in vivo applications, protein function assays can be used to test the functionality of a given FVIII protein to determine if gene expression has successfully occurred. One skilled will be able to determine the best test for measuring functionality of an FVIII protein expressed by the ceDNA vector in vitro or in vivo.

[0699] It is contemplated herein that the effects of gene expression of an FVIII protein from the ceDNA vector in a cell or subject can last for at least 1 month, at least 2 months, at least 3 months, at least four months, at least 5 months, at least six months, at least 10 months, at least 12 months, at least 18 months, at least 2 years, at least 5 years, at least 10 years, at least 20 years, or can be permanent.

[0700] In some embodiments, an FVIII protein in the expression cassette, expression construct, or ceDNA vector described herein can be codon optimized for the host cell. As used herein, the term “codon optimized” or “codon optimization” refers to the process of modifying a nucleic acid sequence for enhanced expression in the cells of the vertebrate of interest, e.g., mouse or human (e.g., humanized), by replacing at least one, more than one, or a significant number of codons of the native sequence (e.g., a prokaryotic sequence) with codons that are more frequently or most frequently used in the genes of that vertebrate. Various species exhibit particular bias for certain codons of a particular amino acid. Typically, codon optimization does not alter the amino acid sequence of the original translated protein. Optimized codons can be determined using e.g., Aptagen's Gene Forge® codon optimization and custom gene synthesis platform (Aptagen, Inc.) or another publicly available database.

D. Determining Efficacy by Assessing FVIII Protein Expression from the ceDNA Vector

[0701] Essentially any method known in the art for determining protein expression can be used to analyze expression of a FVIII protein from a ceDNA vector. Non-limiting examples of such methods/assays include enzyme-linked immunoassay (ELISA), affinity ELISA, ELISPOT, serial dilution, flow cytometry, surface plasmon resonance analysis, kinetic exclusion assay, mass spectrometry, Western blot, immunoprecipitation, and PCR.

[0702] For assessing FVIII protein expression in vivo, a biological sample can be obtained from a subject for analysis. Exemplary biological samples include a biofluid sample, a body fluid sample, blood (including whole blood), serum, plasma, urine, saliva, a biopsy and/or tissue sample etc. A biological sample or tissue sample can also refer to a sample of tissue or fluid isolated from an individual including, but not limited to, tumor biopsy, stool, spinal fluid, pleural fluid, nipple aspirates, lymph fluid, the external sections of the skin, respiratory, intestinal, and genitourinary tracts, tears, saliva, breast milk, cells (including, but not limited to, blood cells), tumors, organs, and also samples of in vitro cell culture constituent. The term also includes a mixture of the above-mentioned samples. The term “sample” also includes untreated or pretreated (or pre-processed) biological samples. In some embodiments, the sample used for the assays and methods described herein comprises a serum sample collected from a subject to be tested.

### E. Determining Efficacy of the Expressed FVIII Protein by Clinical Parameters

[0703] The efficacy of a given FVIII protein expressed by a ceDNA vector for hemophilia A (i.e., functional expression) can be determined by the skilled clinician. However, a treatment is considered “effective treatment,” as the term is used herein, if any one or all of the signs or symptoms of hemophilia A is/are altered in a beneficial manner, or other clinically accepted symptoms or markers of disease are improved, or ameliorated, e.g., by at least 10% following treatment with a ceDNA vector encoding a therapeutic FVIII protein as described herein. Efficacy can also be measured by failure of an individual to worsen as assessed by stabilization of hemophilia A, or the need for medical interventions (i.e., progression of the disease is halted or at least slowed). Methods of measuring these indicators are known to those of skill in the art and/or described herein. Treatment includes any treatment of a disease in an individual or an animal (some non-limiting examples include a human, or a mammal) and includes: (1) inhibiting hemophilia A, e.g., arresting, or slowing progression of hemophilia A; or (2) relieving the hemophilia A, e.g., causing regression of a hemophilia A symptom; and (3) preventing or reducing the likelihood of the development of the hemophilia A disease, or preventing secondary diseases/disorders associated with hemophilia A. An effective amount for the treatment of a disease means that amount which, when administered to a mammal in need thereof, is sufficient to result in effective treatment as that term is defined herein, for that disease. Efficacy of an agent can be determined by assessing physical indicators that are particular to hemophilia A disease. A physician can assess for any one or more of clinical symptoms of hemophilia A which include: unexplained and excessive bleeding from cuts or injuries, or after surgery or dental work; many large or deep bruises; unusual bleeding after vaccinations; pain, swelling or tightness in your joints; blood in your urine or stool; nosebleeds without a known cause; in infants, unexplained irritability.

### XI. Various Applications of ceDNA Vectors Expressing Antibodies or Fusion Proteins

[0704] As disclosed herein, the compositions and ceDNA vectors for expression of FVIII protein as described herein can be used to express an FVIII protein for a range of purposes. In one embodiment, the ceDNA vector expressing an FVIII protein can be used to create a somatic transgenic animal model harboring the transgene, e.g., to study the function or disease progression of hemophilia A. In some embodiments, a ceDNA vector expressing an FVIII protein is useful for the treatment, prevention, or amelioration of hemophilia A states or disorders in a mammalian subject.

[0705] In some embodiments the FVIII protein can be expressed from the ceDNA vector in a subject in a sufficient amount to treat a disease associated with increased expression, increased activity of the gene product, or inappropriate upregulation of a gene.

[0706] In some embodiments the FVIII protein can be expressed from the ceDNA vector in a subject in a sufficient amount to treat hemophilia A with a reduced expression, lack of expression or dysfunction of a protein.

[0707] It will be appreciated by one of ordinary skill in the art that the transgene may not be an open reading frame of a gene to be transcribed itself; instead it may be a promoter region or repressor region of a target gene, and the ceDNA vector may modify such region with the outcome of so modulating the expression of the FVIII gene.

[0708] The compositions and ceDNA vectors for expression of FVIII protein as disclosed herein can be used to deliver an FVIII protein for various purposes as described above.

[0709] In some embodiments, the transgene encodes one or more FVIII proteins which are useful for the treatment, amelioration, or prevention of hemophilia A states in a mammalian subject. The FVIII protein expressed by the ceDNA vector is administered to a patient in a sufficient amount to treat hemophilia A associated with an abnormal gene sequence, which can result in any one or more of the following: increased protein expression, over activity of the protein, reduced expression, lack of expression or dysfunction of the target gene or protein.

[0710] In some embodiments, the ceDNA vectors for expression of FVIII protein as disclosed herein are envisioned for use in diagnostic and screening methods, whereby an FVIII protein is transiently or stably expressed in a cell culture system, or alternatively, a transgenic animal model.

[0711] Another aspect of the technology described herein provides a method of transducing a population of mammalian cells with a ceDNA vector for expression of FVIII protein as disclosed herein. In an overall and general sense, the method includes at least the step of introducing into one or more cells of the population, a composition that comprises an effective amount of one or more of the ceDNA vectors for expression of FVIII protein as disclosed herein.

[0712] Additionally, the present disclosure provides compositions, as well as therapeutic and/or diagnostic kits that include one or more of the disclosed ceDNA vectors for expression of FVIII protein as disclosed herein or ceDNA compositions, formulated with one or more additional ingredients, or prepared with one or more instructions for their use.

[0713] A cell to be administered a ceDNA vector for expression of FVIII protein as disclosed herein may be of any type, including but not limited to neural cells (including cells of the peripheral and central nervous systems, in particular, brain cells), lung cells, retinal cells, epithelial cells (e.g., gut and respiratory epithelial cells), muscle cells, dendritic cells, pancreatic cells (including islet cells), hepatic cells, myocardial cells, bone cells (e.g., bone marrow stem cells), hematopoietic stem cells, spleen cells, keratinocytes, fibroblasts, endothelial cells, prostate cells, germ cells, and the like. Alternatively, the cell may be any progenitor cell. As a further alternative, the cell can be a stem cell (e.g., neural stem cell, liver stem cell). As still a further alternative, the cell may be a cancer or tumor cell. Moreover, the cells can be from any species of origin, as indicated above.

A. Production and Purification of ceDNA Vectors Expressing FVIII

[0714] The ceDNA vectors disclosed herein are to be used to produce FVIII protein either in vitro or in vivo. The FVIII proteins produced in this manner can be isolated, tested for a desired function, and purified for further use in research or as a therapeutic treatment. Each system of protein production has its own advantages/disadvantages. While proteins produced in vitro can be easily purified and can proteins in a short time, proteins produced in vivo can have post-translational modifications, such as glycosylation.

[0715] FVIII therapeutic protein produced using ceDNA vectors can be purified using any method known to those of skill in the art, for example, ion exchange chromatography, affinity chromatography, precipitation, or electrophoresis.

[0716] An FVIII therapeutic protein produced by the methods and compositions described herein can be tested for binding to the desired target protein.

[0717] The technology described herein is further illustrated by the following examples which in no way should be construed as being further limiting. It should be understood that this disclosure is not limited to the particular methodology, protocols, and reagents, etc., described herein and as such can vary. The terminology used herein is for the purpose of describing particular embodiments only and is not intended to limit the scope of the present disclosure, which is defined solely by the claims.

### EXAMPLES

[0718] The following examples are provided by way of illustration not limitation. It will be appreciated by one of ordinary skill in the art that ceDNA vectors can be constructed from any of the wild-type or modified ITRs described herein, and that the following exemplary methods can be used to construct and assess the activity of such ceDNA vectors. While the methods are exemplified with certain ceDNA vectors, they are applicable to any ceDNA vector in keeping with the description.

### Example 1: Constructing ceDNA Vectors Using an Insect Cell-Based Method

[0719] Production of the ceDNA vectors using a polynucleotide construct template is described in Example 1 of PCT/US18/49996, which is incorporated herein in its entirety by reference. For example, a polynucleotide construct template used for generating the ceDNA vectors of the present disclosure can be a ceDNA-plasmid, a ceDNA-Bacmid, and/or a ceDNA-baculovirus. Without being limited to theory, in a permissive host cell, in the presence of e.g., Rep, the polynucleotide construct template having two symmetric ITRs and an expression construct, where at least one of the ITRs is modified relative to a wild-type ITR sequence, replicates to produce ceDNA vectors. ceDNA vector production undergoes two steps: first, excision (“rescue”) of template from the template backbone (e.g., ceDNA-plasmid, ceDNA-bacmid, ceDNA-baculovirus genome etc.) via Rep proteins, and second, Rep mediated replication of the excised ceDNA vector.

[0720] Production of ceDNA-Bacmids:

[0721] DH10Bac competent cells (MAX EFFICIENCY® DH10Bac™ Competent Cells, Thermo Fisher) were transformed with either test or control plasmids following a protocol according to the manufacturer's instructions. Recombination between the plasmid and a baculovirus shuttle vector in the DH10Bac cells were induced to generate recombinant ceDNA-bacmids. The recombinant bacmids were selected by screening a positive selection based on blue-white screening in E. coli (Φ80dlacZΔM15 marker provides α-complementation of the β-galactosidase gene from the bacmid vector) on a bacterial agar plate containing X-gal and IPTG with antibiotics to select for transformants and maintenance of the bacmid and transposase plasmids. White colonies caused by transposition that disrupts the β-galactoside indicator gene were picked and cultured in 10 ml of media.

[0722] The recombinant ceDNA-bacmids were isolated from the E. coli and transfected into Sf9 or Sf21 insect cells using FugeneHD to produce infectious baculovirus. The adherent Sf9 or Sf21 insect cells were cultured in 50 ml of media in T25 flasks at 25° C. Four days later, culture medium (containing the P0 virus) was removed from the cells, filtered through a 0.45 μm filter, separating the infectious baculovirus particles from cells or cell debris.

[0723] Optionally, the first generation of the baculovirus (P0) was amplified by infecting naïve Sf9 or Sf21 insect cells in 50 to 500 ml of media. Cells were maintained in suspension cultures in an orbital shaker incubator at 130 rpm at 25° C., monitoring cell diameter and viability, until cells reach a diameter of 18-19 nm (from a naïve diameter of 14-15 nm), and a density of ˜4.0E+6 cells/mL. Between 3 and 8 days post-infection, the P1 baculovirus particles in the medium were collected following centrifugation to remove cells and debris then filtration through a 0.45 μm filter.

[0724] The ceDNA-baculovirus comprising the test constructs were collected and the infectious activity, or titer, of the baculovirus was determined. Specifically, four×20 ml Sf9 cell cultures at 2.5E+6 cells/ml were treated with P1 baculovirus at the following dilutions: 1/1000, 1/10,000, 1/50,000, 1/100,000, and incubated at 25-27° C. Infectivity was determined by the rate of cell diameter increase and cell cycle arrest, and change in cell viability every day for 4 to 5 days.

[0725] A “Rep-plasmid” as disclosed in FIG. 8A of PCT/US18/49996, which is incorporated herein in its entirety by reference, was produced in a pFASTBAC™-Dual expression vector (ThermoFisher) comprising both the Rep78 and Rep52 or Rep68 and Rep40. The Rep-plasmid was transformed into the DH10Bac competent cells (MAX EFFICIENCY® DH10Bac™ Competent Cells (Thermo Fisher) following a protocol provided by the manufacturer. Recombination between the Rep-plasmid and a baculovirus shuttle vector in the DH10Bac cells were induced to generate recombinant bacmids (“Rep-bacmids”). The recombinant bacmids were selected by a positive selection that included-blue-white screening in E. coli (Φ80dlacZΔM15 marker provides α-complementation of the β-galactosidase gene from the bacmid vector) on a bacterial agar plate containing X-gal and IPTG. Isolated white colonies were picked and inoculated in 10 ml of selection media (kanamycin, gentamicin, tetracycline in LB broth). The recombinant bacmids (Rep-bacmids) were isolated from the E. coli and the Rep-bacmids were transfected into Sf9 or Sf21 insect cells to produce infectious baculovirus.

[0726] The Sf9 or Sf21 insect cells were cultured in 50 ml of media for 4 days, and infectious recombinant baculovirus (“Rep-baculovirus”) were isolated from the culture. Optionally, the first generation Rep-baculovirus (P0) were amplified by infecting naïve Sf9 or Sf21 insect cells and cultured in 50 to 500 ml of media. Between 3 and 8 days post-infection, the P1 baculovirus particles in the medium were collected either by separating cells by centrifugation or filtration or another fractionation process. The Rep-baculovirus were collected and the infectious activity of the baculovirus was determined. Specifically, four×20 mL Sf9 cell cultures at 2.5×10⁶ cells/mL were treated with P1 baculovirus at the following dilutions, 1/1000, 1/10,000, 1/50,000, 1/100,000, and incubated. Infectivity was determined by the rate of cell diameter increase and cell cycle arrest, and change in cell viability every day for 4 to 5 days.

[0727] ceDNA Vector Generation and Characterization

[0728] With reference to FIG. 3B, Sf9 insect cell culture media containing either (1) a sample-containing a ceDNA-bacmid or a ceDNA-baculovirus, and (2) Rep-baculovirus described above were then added to a fresh culture of Sf9 cells (2.5E+6 cells/ml, 20 ml) at a ratio of 1:1000 and 1:10,000, respectively. The cells were then cultured at 130 rpm at 25° C. 4-5 days after the co-infection, cell diameter and viability are detected. When cell diameters reached 18-20 nm with a viability of ˜70-80%, the cell cultures were centrifuged, the medium was removed, and the cell pellets were collected. The cell pellets are first resuspended in an adequate volume of aqueous medium, either water or buffer. The ceDNA vector was isolated and purified from the cells using Qiagen MIDI PLUS™ purification protocol (Qiagen, 0.2 mg of cell pellet mass processed per column).

[0729] Yields of ceDNA vectors produced and purified from the Sf9 insect cells were initially determined based on UV absorbance at 260 nm.

[0730] ceDNA vectors can be assessed by identified by agarose gel electrophoresis under native or denaturing conditions as illustrated in FIG. 3D, where (a) the presence of characteristic bands migrating at twice the size on denaturing gels versus native gels after restriction endonuclease cleavage and gel electrophoretic analysis and (b) the presence of monomer and dimer (2×) bands on denaturing gels for uncleaved material is characteristic of the presence of ceDNA vector.

[0731] Structures of the isolated ceDNA vectors were further analyzed by digesting the DNA obtained from co-infected Sf9 cells (as described herein) with restriction endonucleases selected for a) the presence of only a single cut site within the ceDNA vectors, and b) resulting fragments that were large enough to be seen clearly when fractionated on a 0.8% denaturing agarose gel (>800 bp). As illustrated in FIGS. 3D and 3E, linear DNA vectors with a non-continuous structure and ceDNA vector with the linear and continuous structure can be distinguished by sizes of their reaction products—for example, a DNA vector with a non-continuous structure is expected to produce 1 kb and 2 kb fragments, while a non-encapsidated vector with the continuous structure is expected to produce 2 kb and 4 kb fragments.

[0732] Therefore, to demonstrate in a qualitative fashion that isolated ceDNA vectors are covalently closed-ended as is required by definition, the samples were digested with a restriction endonuclease identified in the context of the specific DNA vector sequence as having a single restriction site, preferably resulting in two cleavage products of unequal size (e.g., 1000 bp and 2000 bp). Following digestion and electrophoresis on a denaturing gel (which separates the two complementary DNA strands), a linear, non-covalently closed DNA will resolve at sizes 1000 bp and 2000 bp, while a covalently closed DNA (i.e., a ceDNA vector) will resolve at 2×sizes (2000 bp and 4000 bp), as the two DNA strands are linked and are now unfolded and twice the length (though single stranded). Furthermore, digestion of monomeric, dimeric, and n-meric forms of the DNA vectors will all resolve as the same size fragments due to the end-to-end linking of the multimeric DNA vectors (see FIG. 3D).

[0733] As used herein, the phrase “assay for the Identification of DNA vectors by agarose gel electrophoresis under native gel and denaturing conditions” refers to an assay to assess the close-endedness of the ceDNA by performing restriction endonuclease digestion followed by electrophoretic assessment of the digest products. One such exemplary assay follows, though one of ordinary skill in the art will appreciate that many art-known variations on this example are possible. The restriction endonuclease is selected to be a single cut enzyme for the ceDNA vector of interest that will generate products of approximately ⅓× and ⅔× of the DNA vector length. This resolves the bands on both native and denaturing gels. Before denaturation, it is important to remove the buffer from the sample. The Qiagen PCR clean-up kit or desalting “spin columns,” e.g., GE HEALTHCARE ILUSTRA™ MICROSPIN™ G-25 columns are some art-known options for the endonuclease digestion. The assay includes for example, i) digest DNA with appropriate restriction endonuclease(s), 2) apply to e.g., a Qiagen PCR clean-up kit, elute with distilled water, iii) adding 10× denaturing solution (10×=0.5 M NaOH, 10 mM EDTA), add 10× dye, not buffered, and analyzing, together with DNA ladders prepared by adding 10× denaturing solution to 4×, on a 0.8-1.0% gel previously incubated with 1 mM EDTA and 200 mM NaOH to ensure that the NaOH concentration is uniform in the gel and gel box, and running the gel in the presence of 1× denaturing solution (50 mM NaOH, 1 mM EDTA). One of ordinary skill in the art will appreciate what voltage to use to run the electrophoresis based on size and desired timing of results. After electrophoresis, the gels are drained and neutralized in 1×TBE or TAE and transferred to distilled water or 1×TBE/TAE with 1×SYBR Gold. Bands can then be visualized with e.g., Thermo Fisher, SYBR® Gold Nucleic Acid Gel Stain (10,000×Concentrate in DMSO) and epifluorescent light (blue) or UV (312 nm).

[0734] The purity of the generated ceDNA vector can be assessed using any art-known method. As one exemplary and non-limiting method, contribution of ceDNA-plasmid to the overall UV absorbance of a sample can be estimated by comparing the fluorescent intensity of ceDNA vector to a standard. For example, if based on UV absorbance 4 μg of ceDNA vector was loaded on the gel, and the ceDNA vector fluorescent intensity is equivalent to a 2 kb band which is known to be 1 μg, then there is 1 μg of ceDNA vector, and the ceDNA vector is 25% of the total UV absorbing material. Band intensity on the gel is then plotted against the calculated input that band represents—for example, if the total ceDNA vector is 8 kb, and the excised comparative band is 2 kb, then the band intensity would be plotted as 25% of the total input, which in this case would be 0.25 μg for 1.0 μg input. Using the ceDNA vector plasmid titration to plot a standard curve, a regression line equation is then used to calculate the quantity of the ceDNA vector band, which can then be used to determine the percent of total input represented by the ceDNA vector, or percent purity.

[0735] For comparative purposes, Example 1 describes the production of ceDNA vectors using an insect cell based method and a polynucleotide construct template, and is also described in Example 1 of PCT/US18/49996, which is incorporated herein in its entirety by reference. For example, a polynucleotide construct template used for generating the ceDNA vectors of the present disclosure according to Example 1 can be a ceDNA-plasmid, a ceDNA-Bacmid, and/or a ceDNA-baculovirus. Without being limited to theory, in a permissive host cell, in the presence of e.g., Rep, the polynucleotide construct template having two symmetric ITRs and an expression construct, where at least one of the ITRs is modified relative to a wild-type ITR sequence, replicates to produce ceDNA vectors. ceDNA vector production undergoes two steps: first, excision (“rescue”) of template from the template backbone (e.g., ceDNA-plasmid, ceDNA-bacmid, ceDNA-baculovirus genome etc.) via Rep proteins, and second, Rep mediated replication of the excised ceDNA vector.

[0736] An exemplary method to produce ceDNA vectors in a method using insect cell is from a ceDNA-plasmid as described herein.

### Example 2: Synthetic ceDNA Production Via Excision from a Double-Stranded DNA Molecule

[0737] Synthetic production of the ceDNA vectors is described in Examples 2-6 of International Application PCT/US19/14122, filed Jan. 18, 2019, which is incorporated herein in its entirety by reference. One exemplary method of producing a ceDNA vector using a synthetic method that involves the excision of a double-stranded DNA molecule. In brief, a ceDNA vector can be generated using a double stranded DNA construct, e.g., see FIGS. 7A-8E of PCT/US19/14122. In some embodiments, the double stranded DNA construct is a ceDNA plasmid, e.g., see, e.g., FIG. 6 in International patent application PCT/US2018/064242, filed Dec. 6, 2018).

[0738] In some embodiments, a construct to make a ceDNA vector comprises a regulatory switch as described herein.

[0739] For illustrative purposes, Example 2 describes producing ceDNA vectors as exemplary closed-ended DNA vectors generated using this method. However, while ceDNA vectors are exemplified in this Example to illustrate in vitro synthetic production methods to generate a closed-ended DNA vector by excision of a double-stranded polynucleotide comprising the ITRs and expression cassette (e.g., nucleic acid sequence, e.g., heterologous nucleic acid sequence) followed by ligation of the free 3′ and 5′ ends as described herein, one of ordinary skill in the art is aware that one can, as illustrated above, modify the double stranded DNA polynucleotide molecule such that any desired closed-ended DNA vector is generated, including but not limited to, doggybone DNA, dumbbell DNA and the like. Exemplary ceDNA vectors for production of antibodies or fusion proteins that can be produced by the synthetic production method described in Example 2 are discussed in the sections entitled “III ceDNA vectors in general”. Exemplary antibodies and fusion proteins expressed by the ceDNA vectors are described in the section entitled “IIC Exemplary antibodies and fusion proteins expressed by the ceDNA vectors”.

[0740] The method involves (i) excising a sequence encoding the expression cassette from a double-stranded DNA construct and (ii) forming hairpin structures at one or more of the ITRs and (iii) joining the free 5′ and 3′ ends by ligation, e.g., by T4 DNA ligase.

[0741] The double-stranded DNA construct comprises, in 5′ to 3′ order: a first restriction endonuclease site; an upstream ITR; an expression cassette; a downstream ITR; and a second restriction endonuclease site. The double-stranded DNA construct is then contacted with one or more restriction endonucleases to generate double-stranded breaks at both of the restriction endonuclease sites. One endonuclease can target both sites, or each site can be targeted by a different endonuclease as long as the restriction sites are not present in the ceDNA vector template. This excises the sequence between the restriction endonuclease sites from the rest of the double-stranded DNA construct (see FIG. 9 of PCT/US19/14122). Upon ligation a closed-ended DNA vector is formed.

[0742] One or both of the ITRs used in the method may be wild-type ITRs. Modified ITRs may also be used, where the modification can include deletion, insertion, or substitution of one or more nucleotides from the wild-type ITR in the sequences forming B and B′ arm and/or C and C′ arm (see, e.g., FIGS. 6-8 and 10 FIG. 11B of PCT/US19/14122), and may have two or more hairpin loops (see, e.g., FIGS. 6-8 FIG. 11B of PCT/US19/14122) or a single hairpin loop (see, e.g., FIG. 10A-10B FIG. 11B of PCT/US19/14122). The hairpin loop modified ITR can be generated by genetic modification of an existing oligo or by de novo biological and/or chemical synthesis.

[0743] In a non-limiting example, ITR-6 Left and Right (SEQ ID NOS: 111 and 112), include 40 nucleotide deletions in the B-B′ and C-C′ arms from the wild-type ITR of AAV2. Nucleotides remaining in the modified ITR are predicted to form a single hairpin structure. Gibbs free energy of unfolding the structure is about −54.4 kcal/mol. Other modifications to the ITR may also be made, including optional deletion of a functional Rep binding site or a TRS site.

### Example 3: ceDNA Production Via Oligonucleotide Construction

[0744] Another exemplary method of producing a ceDNA vector using a synthetic method that involves assembly of various oligonucleotides, is provided in Example 3 of PCT/US19/14122, where a ceDNA vector is produced by synthesizing a 5′ oligonucleotide and a 3′ ITR oligonucleotide and ligating the ITR oligonucleotides to a double-stranded polynucleotide comprising an expression cassette. FIG. 11B of PCT/US19/14122 shows an exemplary method of ligating a 5′ ITR oligonucleotide and a 3′ ITR oligonucleotide to a double stranded polynucleotide comprising an expression cassette.

[0745] As disclosed herein, the ITR oligonucleotides can comprise WT-ITRs (e.g., see FIG. 2A, FIG. 2C), or modified ITRs (e.g., see, FIG. 2B and FIG. 2D). (See also, e.g., FIGS. 6A, 6B, 7A and 7B of PCT/US19/14122, which is incorporated herein in its entirety). Exemplary ITR oligonucleotides include, but are not limited to SEQ ID NOS: 134-145 (e.g., see Table 7 in of PCT/US19/14122). Modified ITRs can include deletion, insertion, or substitution of one or more nucleotides from the wild-type ITR in the sequences forming B and B′ arm and/or C and C′ arm. ITR oligonucleotides, comprising WT-ITRs or mod-ITRs as described herein, to be used in the cell-free synthesis, can be generated by genetic modification or biological and/or chemical synthesis. As discussed herein, the ITR oligonucleotides in Examples 2 and 3 can comprise WT-ITRs, or modified ITRs (mod-ITRs) in symmetrical or asymmetrical configurations, as discussed herein.

### Example 4: ceDNA Production Via a Single-Stranded DNA Molecule

[0746] Another exemplary method of producing a ceDNA vector using a synthetic method is provided in Example 4 of PCT/US19/14122, and uses a single-stranded linear DNA comprising two sense ITRs which flank a sense expression cassette sequence and are attached covalently to two antisense ITRs which flank an antisense expression cassette, the ends of which single stranded linear DNA are then ligated to form a closed-ended single-stranded molecule. One non-limiting example comprises synthesizing and/or producing a single-stranded DNA molecule, annealing portions of the molecule to form a single linear DNA molecule which has one or more base-paired regions of secondary structure, and then ligating the free 5′ and 3′ ends to each other to form a closed single-stranded molecule.

[0747] An exemplary single-stranded DNA molecule for production of a ceDNA vector comprises, from 5′ to 3′: a sense first ITR; a sense expression cassette sequence; a sense second ITR; an antisense second ITR; an antisense expression cassette sequence; and an antisense first ITR.

[0748] A single-stranded DNA molecule for use in the exemplary method of Example 4 can be formed by any DNA synthesis methodology described herein, e.g., in vitro DNA synthesis, or provided by cleaving a DNA construct (e.g., a plasmid) with nucleases and melting the resulting dsDNA fragments to provide ssDNA fragments.

[0749] Annealing can be accomplished by lowering the temperature below the calculated melting temperatures of the sense and antisense sequence pairs. The melting temperature is dependent upon the specific nucleotide base content and the characteristics of the solution being used, e.g., the salt concentration. Melting temperatures for any given sequence and solution combination are readily calculated by one of ordinary skill in the art.

[0750] The free 5′ and 3′ ends of the annealed molecule can be ligated to each other, or ligated to a hairpin molecule to form the ceDNA vector. Suitable exemplary ligation methodologies and hairpin molecules are described in Examples 2 and 3.

### Example 5: Purifying and/or Confirming Production of ceDNA

[0751] Any of the DNA vector products produced by the methods described herein, e.g., including the insect cell based production methods described in Example 1, or synthetic production methods described in Examples 2-4 can be purified, e.g., to remove impurities, unused components, or byproducts using methods commonly known by a skilled artisan; and/or can be analyzed to confirm that DNA vector produced, (in this instance, a ceDNA vector) is the desired molecule. An exemplary method for purification of the DNA vector, e.g., ceDNA is using Qiagen Midi Plus purification protocol (Qiagen) and/or by gel purification.

[0752] The following is an exemplary method for confirming the identity of ceDNA vectors.

[0753] ceDNA vectors can be assessed by identified by agarose gel electrophoresis under native or denaturing conditions as illustrated in FIG. 3D, where (a) the presence of characteristic bands migrating at twice the size on denaturing gels versus native gels after restriction endonuclease cleavage and gel electrophoretic analysis and (b) the presence of monomer and dimer (2×) bands on denaturing gels for uncleaved material is characteristic of the presence of ceDNA vector.

[0754] Structures of the isolated ceDNA vectors were further analyzed by digesting the purified DNA with restriction endonucleases selected for a) the presence of only a single cut site within the ceDNA vectors, and b) resulting fragments that were large enough to be seen clearly when fractionated on a 0.8% denaturing agarose gel (>800 bp). As illustrated in FIGS. 3C and 3D, linear DNA vectors with a non-continuous structure and ceDNA vector with the linear and continuous structure can be distinguished by sizes of their reaction products—for example, a DNA vector with a non-continuous structure is expected to produce 1 kb and 2 kb fragments, while a ceDNA vector with the continuous structure is expected to produce 2 kb and 4 kb fragments.

[0755] Therefore, to demonstrate in a qualitative fashion that isolated ceDNA vectors are covalently closed-ended as is required by definition, the samples were digested with a restriction endonuclease identified in the context of the specific DNA vector sequence as having a single restriction site, preferably resulting in two cleavage products of unequal size (e.g., 1000 bp and 2000 bp). Following digestion and electrophoresis on a denaturing gel (which separates the two complementary DNA strands), a linear, non-covalently closed DNA will resolve at sizes 1000 bp and 2000 bp, while a covalently closed DNA (i.e., a ceDNA vector) will resolve at 2× sizes (2000 bp and 4000 bp), as the two DNA strands are linked and are now unfolded and twice the length (though single stranded). Furthermore, digestion of monomeric, dimeric, and n-meric forms of the DNA vectors will all resolve as the same size fragments due to the end-to-end linking of the multimeric DNA vectors (see FIG. 3E).

[0756] As used herein, the phrase “assay for the Identification of DNA vectors by agarose gel electrophoresis under native gel and denaturing conditions” refers to an assay to assess the close-endedness of the ceDNA by performing restriction endonuclease digestion followed by electrophoretic assessment of the digest products. One such exemplary assay follows, though one of ordinary skill in the art will appreciate that many art-known variations on this example are possible. The restriction endonuclease is selected to be a single cut enzyme for the ceDNA vector of interest that will generate products of approximately ⅓× and ⅔× of the DNA vector length. This resolves the bands on both native and denaturing gels. Before denaturation, it is important to remove the buffer from the sample. The Qiagen PCR clean-up kit or desalting “spin columns,” e.g., GE HEALTHCARE ILUSTRA™ MICROSPIN™ G-25 columns are some art-known options for the endonuclease digestion. The assay includes for example, i) digest DNA with appropriate restriction endonuclease(s), 2) apply to e.g., a Qiagen PCR clean-up kit, elute with distilled water, iii) adding 10× denaturing solution (10×=0.5 M NaOH, 10 mM EDTA), add 10× dye, not buffered, and analyzing, together with DNA ladders prepared by adding 10× denaturing solution to 4×, on a 0.8-1.0% gel previously incubated with 1 mM EDTA and 200 mM NaOH to ensure that the NaOH concentration is uniform in the gel and gel box, and running the gel in the presence of 1× denaturing solution (50 mM NaOH, 1 mM EDTA). One of ordinary skill in the art will appreciate what voltage to use to run the electrophoresis based on size and desired timing of results. After electrophoresis, the gels are drained and neutralized in 1×TBE or TAE and transferred to distilled water or 1×TBE/TAE with 1×SYBR Gold. Bands can then be visualized with e.g., Thermo Fisher, SYBR® Gold Nucleic Acid Gel Stain (10,000×Concentrate in DMSO) and epifluorescent light (blue) or UV (312 nm). The foregoing gel-based method can be adapted to purification purposes by isolating the ceDNA vector from the gel band and permitting it to renature.

[0757] The purity of the generated ceDNA vector can be assessed using any art-known method. As one exemplary and non-limiting method, contribution of ceDNA-plasmid to the overall UV absorbance of a sample can be estimated by comparing the fluorescent intensity of ceDNA vector to a standard. For example, if based on UV absorbance 4 μg of ceDNA vector was loaded on the gel, and the ceDNA vector fluorescent intensity is equivalent to a 2 kb band which is known to be 1 μg, then there is 1 μg of ceDNA vector, and the ceDNA vector is 25% of the total UV absorbing material. Band intensity on the gel is then plotted against the calculated input that band represents—for example, if the total ceDNA vector is 8 kb, and the excised comparative band is 2 kb, then the band intensity would be plotted as 25% of the total input, which in this case would be 0.25 μg for 1.0 μg input. Using the ceDNA vector plasmid titration to plot a standard curve, a regression line equation is then used to calculate the quantity of the ceDNA vector band, which can then be used to determine the percent of total input represented by the ceDNA vector, or percent purity.

### Example 6: ceDNA FVIII Constructs and Methods

[0758] Full-length, unmodified FVIII poses a number of challenges in its application in gene therapy. FVIII does not perform well in heterologous systems, and shows poor expression compared to similarly sized proteins. It has been shown that inefficient secretion of FVIII can lead to cellular stress, both inactive and active forms of FVIII have a short half-life, and FVIII does not behave well in circulation. Further, FVIII has been shown to be highly immunogenic. A schematic of FVIII domains, as processed through active FVIIIa is shown in FIG. 9.

[0759] The following Examples describe preparation and testing of ceDNA FVIII constructs that show expression and activity following both hydrodynamic and lipid nanoparticle administration.

[0760] FIG. 5 is an annotated schematic of the ceDNA 1638 construct. FIG. 6 is an annotated schematic of the ceDNA 1652 construct. FIG. 7 is an annotated schematic of the ceDNA 1923 construct. FIG. 8 is an annotated schematic of the ceDNA 1373 intron.

[0761] The following ceDNA FVIII constructs were employed in the studies described in Example 7-Example 16.

TABLE 20
ceDNA Construct Summary

| ceDNA | |
|---|---|
| construct | |
| identifier | Description |
| 692 | B-domain deleted SQ codon optimized (Biomarin) |
| 1362 | 1x hSerpEnh_VD_PromoterSet \|\| PmeI_site \|\| Consensus_Kozak \|\| hFVIII-Wt-Afstyla |
| | BDD \|\| PacI_site \|\| WPRE_3pUTR \|\| bGH |
| 1368 | 1x hSerpEnh_VD_PromoterSet \|\| PmeI_site \|\| Consensus_Kozak \|\| hFVIII-F309S- |
| | BD226-Codop-run4-seq102-Afstyla-BDD-F309 \|\| PacI_site \|\| WPRE_3pUTR \|\| bGH |
| 1374 | 1x hSerpEnh_VD_PromoterSet \|\| PmeI_site \|\| Consensus_Kozak \|\| hFVIII-F309S- |
| | BD226seq124-Afstyla-BDD-F309 \|\| PacI_site \|\| WPRE_3pUTR \|\| bGH |
| 1918 | 1x hSerpEnh_VD_PromoterSet \|\| PmeI_site \|\| Consensus_Kozak \|\| FVIII- |
| | SC_0CpG_1_ORF \|\| PacI_site \|\| WPRE_3pUTR \|\| bGH |
| 1919 | 1x hSerpEnh_VD_PromoterSet \|\| PmeI_site \|\| Consensus_Kozak \|\| FVIII- |
| | SC_0CpG_6_ORF \|\| PacI_site \|\| WPRE_3pUTR \|\| bGH |
| 1920 | 1x hSerpEnh_VD_PromoterSet \|\| PmeI_site \|\| Consensus_Kozak \|\| FVIII- |
| | SC_0CpG_8_ORF \|\| PacI_site \|\| WPRE_3pUTR \|\| bGH |
| 1922 | 1x hSerpEnh_VD_PromoterSet \|\| PmeI_site \|\| Consensus_Kozak \|\| FVIII- |
| | SC_5k_wt3_3_ORF \|\| PacI_site \|\| WPRE_3pUTR \|\| bGH |
| 1923 | 1x hSerpEnh_VD_PromoterSet \|\| PmeI_site \|\| Consensus_Kozak \|\| FVIII- |
| | SC_5k_wt3_5_ORF \|\| PacI_site \|\| WPRE_3pUTR \|\| bGH |
| 1367 | 1x hSerpEnh_VD_PromoterSet \|\| PmeI_site \|\| Consensus_Kozak \|\| hFVIII-F309S- |
| | BD226-Codop-run4-seq102-Afstyla-BDD-F309S \|\| PacI_site \|\| WPRE_3pUTR \|\| bGH |
| 1373 | 1x hSerpEnh_VD_PromoterSet \|\| PmeI_site \|\| Consensus_Kozak \|\| hFVIII-F309S- |
| | BD226seq124-Afstyla-BDD-F309S \|\| PacI_site \|\| WPRE_3pUTR \|\| bGH |
| 1632 | CpGmin_hAAT_Promoter_Set \|\| PmeI_site \|\| Mod_Minimum_Consensus_Kozak \|\| |
| | hFVIII-F309S-BD226-Codop-run4-seq102-Afstyla-BDD-F309S \|\| PacI_site \|\| |
| | HBBv3_3pUTR \|\| SV40_polyA |
| 1637 | CpGmin_hAAT_Promoter_Set \|\| PmeI_site \|\| Mod_Minimum_Consensus_Kozak \|\| |
| | hFVIII-F309S-BD226seq124-Afstyla-BDD-F309S \|\| PacI_site \|\| HBBv3_3pUTR \|\| |
| | SV40_polyA |
| 1638 | CpGmin_hAAT_Promoter_Set \|\| hFVIII-F309S-BD226seq124-Afstyla-BDD-F309S \|\| |
| | PacI_site \|\| HBBv3_3pUTR \|\| SV40_polyA |
| 1645 | CpGmin_hAAT_Promoter_Set \|\| PmeI_site \|\| Mod_Minimum_Consensus_Kozak |
| | \|hFVIII-F309S-BD226-Codop-run4-seq102-Afstyla-BDD-F309S \|\| PacI_site \|\| |
| | SV40_polyA |
| 1646 | CpGmin_hAAT_Promoter_Set \|\| Pmel_site \|\| Mod_Minimum_Consensus_Kozak \|\| |
| | hFVIII-F309S-BD226-Codop-run4-seq102-Afstyla-BDD-F309S \|\| PacI_site \|\| |
| | HBBv3_3pUTR |
| 1648 | 3x hSerpEnh_VD _TTRe_PromoterSet \|\| Consensus_Kozak \|\| hFVIII-F309S-BD226- |
| | Codop-run4-seq102-Afstyla-BDD-F309S \|\| PacI_site \|\| WPRE_3pUTR \|\| bGH |
| 1657 | 3x hSerpEnh_VD _PromoterSet (5'UTR variant) \|\| PmeI_site \|\| Consensus_Kozak \|\| |
| | hFVIII-F309S-BD226seq124-Afstyla-BDD \|\| PacI_site \|\| WPRE_3pUTR \|\| bGH |
| 1922 | 1x hSerpEnh_VD_PromoterSet \|\| PmeI_site \|\| Consensus_Kozak \|\| FVIII- |
| | SC_5k_wt3_3_ORF \|\| PacI_site \|\| WPRE_3pUTR \|\| bGH |
| 1923 | 1x hSerpEnh_VD_PromoterSet \|\| PmeI_site \|\| Consensus_Kozak \|\| FVIII- |
| | SC_5k_wt3_5_ORF \|\| PacI_site \|\| WPRE_3pUTR \|\| bGH |
| 1368 | 1x hSerpEnh_VD_PromoterSet \|\| PmeI_site \|\| Consensus_Kozak \|\| hFVIII-F309S- |
| | BD226-Codop-run4-seq102-Afstyla-BDD-F309 \|\| PacI_site \|\| WPRE_3pUTR \|\| bGH |
| 1374 | 1x hSerpEnh_VD_PromoterSet \|\| PmeI_site \|\| Consensus_Kozak \|\| hFVIII-F309S- |
| | BD226seq124-Afstyla-BDD-F309 \|\| PacI_site \|\| WPRE_3pUTR \|\| bGH |
| 1649 | 3x SerpEnh VD _TTRe_PromoterSet \|\| Consensus_Kozak \|\| hFVIII-F309S-BD226- |
| | Codop-run4-seq102-Afstyla-BDD-F309 \|\| PacI_site \|\| WPRE_3pUTR \|\| bGH |
| 1651 | 3x SerpEnh VD _TTRe_PromoterSet \|\| Consensus_Kozak \|\| hFVIII-F309S- |
| | BD226seq124-Afstyla-BDD-F309 \|\| PacI_site \|\| WPRE_3pUTR \|\| bGH |
| 1652 | 3x SerpEnh VD _TTRe_PromoterSet (5'UTR variant) \|\| Consensus_Kozak \|\| hFVIII- |
| | F309S-BD226seq124-Afstyla-BDD-F309 \|\| PacI_site \|\| WPRE_3pUTR \|\| bGH |
| 1655 | 3x SerpEnh VD _PromoterSet \|\| Consensus_Kozak \|\| hFVIII-F309S-BD226-Codop- |
| | run4-seq102-Afstyla-BDD-F309 \|\| PacI_site \|\| WPRE_3pUTR \|\| bGH |
| 1668 | 3x SerpEnh VD _TTRe_PromoterSet_v2 \|\| PmeI_site \|\| Consensus_Kozak \|\| hFVIII- |
| | F309S-BD226seq124-Afstyla-BDD-F309 \|\| PacI_site \|\| WPRE_3pUTR \|\| bGH |
| 1367 | 1x hSerpEnh_VD_PromoterSet \|\| PmeI_site \|\| Consensus_Kozak \|\| hFVIII-F309S- |
| | BD226-Codop-run4-seq102-Afstyla-BDD-F309S \|\| PacI_site \|\| WPRE_3pUTR \|\| bGH |
| 1373 | 1x hSerpEnh_VD_PromoterSet \|\| PmeI_site \|\| Consensus_Kozak \|\| hFVIII-F309S- |
| | BD226seq124-Afstyla-BDD-F309S \|\| PacI_site \|\| WPRE_3pUTR \|\| bGH |
| 1700 | 1x hSerpEnh_VD_PromoterSet \|\| PmeI_site \|\| Consensus_Kozak \|\| |
| | ceDNA1367_ORF_exon1_33bpflanks_hFVIII-F309S-BD226-Codop-run4-seq102- |
| | Afstyla-BDD \|\| miniF8_50/100 \|\| ceDNA1367_ORF_exon2-26_33bpflanks_hFVIII- |
| | F309S-BD226-Codop-run4-seq102-Afstyla-BDD \|\| PacI_site \|\| WPRE_3pUTR \|\| |
| | bGH |
| 1701 | 1x hSerpEnh_VD_PromoterSet \|\| PmeI_site \|\| Consensus_Kozak \|\| |
| | ceDNA1367_ORF_exon1_33bpflanks_hFVIII-F309S-BD226-Codop-run4-seq102- |
| | Afstyla-BDD \|\| miniF8_200/200 \|\| ceDNA1367_ORF_exon2-26_33bpflanks_hFVIII- |
| | F309S-BD226-Codop-run4-seq102-Afstyla-BDD \|\| PacI_site \|\| WPRE_3pUTR \|\| |
| | bGH |
| 1708 | 1x hSerpEnh_VD_PromoterSet \|\| PmeI_site \|\| Consensus_Kozak \|\| |
| | ceDNA1373_ORF_exon1_ hFVIII-F309S-BD226seq124-Afstyla-BDD \|\| |
| | miniF8_500/500 \|\| ceDNA1373_ORF_exon2-26_ hFVIII-F309S-BD226seq124- |
| | Afstyla-BDD \|\| PacI_site \|\| WPRE_3pUTR \|\| bGH |
| 1712 | 1x hSerpEnh_VD_PromoterSet \|\| PmeI_site \|\| Consensus_Kozak \|\| |
| | ceDNA1373_ORF_exon1_ hFVIII-F309S-BD226seq124-Afstyla-BDD \|\| |
| | miniF8_200_5p \|\| miniF8_200_3p \|\| ceDNA1373_ORF_exon2-26_ hFVIII-F309S- |
| | BD226seq124-Afstyla-BDD \|\| PacI_site \|\| WPRE_3pUTR \|\| bGH |
| 1725 | 1x hSerpEnh_VD_PromoterSet \|\| PmeI_site \|\| Consensus_Kozak \|\| |
| | ceDNA1373_ORF_exon1_33bpflanks_ hFVIII-F309S-BD226seq124-Afstyla-BDD \| |
| | miniF8_50/100 \|\| ceDNA1373_ORF_exon2-26_33bpflanks_ hFVIII-F309S- |
| | BD226seq124-Afstyla-BDD \|\| PacI_site \|\| WPRE_3pUTR \|\| bGH |
| 1368 | 1x hSerpEnh_VD_PromoterSet \|\| PmeI_site \|\| Consensus_Kozak \|\| hFVIII-F309S- |
| | BD226-Codop-run4-seq102-Afstyla-BDD-F309 \|\| PacI_site \|\| WPRE_3pUTR \|\| bGH |
| 1374 | 1x hSerpEnh_VD_PromoterSet \|\| PmeI_site \|\| Consensus_Kozak \|\| hFVIII-F309S- |
| | BD226seq124-Afstyla-BDD-F309 \|\| PacI_site \|\| WPRE_3pUTR \|\| bGH |
| 1579 | 1x hSerpEnh_VD_PromoterSet \|\| PmeI_site \|\| Consensus_Kozak \|\| FVIII- |
| | 1368ORF_ALB-SSv1 \|\| PacI_site \|\| WPRE_3pUTR \|\| bGH |
| 1582 | 1x hSerpEnh_VD_PromoterSet \|\| PmeI_site \|\| Consensus_Kozak \|\| FVIII- |
| | 1368ORF_GAUS-SSv1 \|\| PacI_site \|\| WPRE_3pUTR \|\| bGH |
| 1585 | 1x hSerpEnh_VD_PromoterSet \|\| PmeI_site \|\| Consensus_Kozak \|\| FVIII- |
| | 1368ORF_Secrecon-SSv1 \|\| PacI_site \|\| WPRE_3pUTR \|\| bGH |
| 1598 | 1x hSerpEnh_VD_PromoterSet \|\| PmeI_site \|\| Consensus_Kozak \|\| FVIII- |
| | 1368ORF_Gaus-NS-CAI-v2 \|\| PacI_site \|\| WPRE_3pUTR \|\| bGH |
| 1611 | 1x hSerpEnh_VD_PromoterSet \|\| PmeI_site \|\| Consensus_Kozak \|\| FVIII- |
| | 1374ORF_ALB-SSv1 \|\| PacI_site \|\| WPRE_3pUTR \|\| bGH |
| 1612 | 1x hSerpEnh_VD_PromoterSet \|\| PmeI_site \|\| Consensus_Kozak \|\| FVIII- |
| | 1374ORF_CHY-SSv1 \|\| PacI_site \|\| WPRE_3pUTR \|\| bGH |
| 1615 | 1x hSerpEnh_VD_PromoterSet \|\| PmeI_site \|\| Consensus_Kozak \|\| FVIII- |
| | 1374ORF_LONZ-SSv2 \|\| PacI_site \|\| WPRE_3pUTR \|\| bGH |
| 1616 | 1x hSerpEnh_VD_PromoterSet \|\| PmeI_site \|\| Consensus_Kozak \|\| FVIII- |
| | 1374ORF_Secrecon-SSv1 \|\| PacI_site \|\| WPRE_3pUTR \|\| bGH |
| 1270 | 1x hSerpEnh_VD_PromoterSet \|\| PmeI_site \|\| Consensus _Kozak \|\| hFVIII-F309S- |
| | BD226seq124 \|\| PacI_site \|\| WPRE_3pUTR \|\| bGH |
| 1391 | 1x hSerpEnh_VD_PromoterSet \|\| PmeI_site \|\| Consensus_Kozak \|\| hFVIII-F309S- |
| | BD226-Codop-run4-seq102 \|\| PacI_site \|\| WPRE_3pUTR \|\| bGH |
| 1738 | 1x hSerpEnh_VD_PromoterSet \|\| PmeI_site \|\| 5pUTR-constant \|\| 5pUTR-325243 \| |
| | hFVIII-F309S-BD226seq124 \|\| PacI_site \|\| WPRE_3pUTR \|\| bGH |
| 1740 | 1x hSerpEnh_VD_PromoterSet \|\| PmeI_site \|\| Consensus_Kozak \|\| hFVIII-F309S- |
| | BD226-Codop-run4-seq102 \|\| PacI_site \|\| WPRE_3pUTR \|\| bGH \|\| 5'DTS_primer_pad |
| | \|\| 5x_kB_mesika_DTS \|\| 3'DTS_primer_pad |
| 1741 | 1x hSerpEnh_VD_PromoterSet \|\| PmeI_site \|\| Consensus_Kozak \|\| hFVIII-F309S- |
| | BD226-Codop-run4-seq102 \|\| PacI_site \|\| WPRE_3pUTR \|\| bGH \|\| CpGfree20mer_1 \|\| |
| | SV40DNA_DTS_72bpTandemRepeat \|\| CpGfree20mer_2 \|\| |
| | SV40DNA_DTS_72bpTandemRepeat \|\| CpGfree20mer_3 \|\| |
| | SV40DNA_DTS_72bpTandemRepeat \|\| CpGfree20mer_4 \|\| |
| | SV40DNA_DTS_72bpTandemRepeat \|\| CpGfree20mer_5 \|\| |
| | SV40DNA_DTS_72bpTandemRepeat |
| 1742 | 5'DTS_primer_pad \|\| 5x_kB_mesika_DTS \|\| 3'DTS_primer_pad \|\| 1x |
| | hSerpEnh_VD_PromoterSet \|\| PmeI_site \|\| Consensus_Kozak \|\| hFVIII-F309S- |
| | BD226-Codop-run4-seq102 \|\| PacI_site \|\| WPRE_3pUTR \|\| bGH |
| 1743 | CpGfree20mer_1 \|\| SV40DNA_DTS_72bpTandemRepeat \|\| CpGfree20mer_2 \|\| |
| | SV40DNA_DTS_72bpTandemRepeat \|\| CpGfree20mer_3 \|\| |
| | SV40DNA_DTS_72bpTandemRepeat \|\| CpGfree20mer_4 |
| | SV40DNA_DTS_72bpTandemRepeat \|\| CpGfree20mer_5 \|\| |
| | SV40DNA_DTS_72bpTandemRepeat \|\| 1x hSerpEnh_VD_PromoterSet \|\| PmeI_site \|\| |
| | Consensus_Kozak \|\| hFVIII-F309S-BD226-Codop-run4-seq102 \|\| PacI_site \|\| |
| | WPRE_3pUTR \|\| bGH |
| 1744 | 1x hSerpEnh_VD_PromoterSet \|\| PmeI_site \|\| 5pUTR-constant \|\| 5pUTR-325243 \|\| |
| | hFVIII-F309S-BD226seq124 \|\| PacI_site \|\| WPRE_3pUTR \|\| bGH \|\| AflII_site \|\| |
| | CpGfree20mer_1, CBX3(674mut1) \|\| 20mer_16 |
| 694 | B domain deleted SQ condon optimized (Sangamo) |
| 1572 | CpGfree20mer_1 \|\| 5xHNF1_ProEnh_10mer \|\| 3x hSerpEnh_VD_ |
| | TTRe_PromoterSet_v2 \|\| PmeI_site \|\| Consensus_Kozak \|\| hFVIII-F309S-BD226- |
| | Codop-run4-seq102-Afstyla-BDD-F309S \|\| PacI_site \|\| WPRE_3pUTR \|\| bGH |
| 1664 | 3x hSerpEnh_VD _TTRe_PromoterSet_v2* \|\| PmeI_site \|\| Consensus_Kozak \|\| |
| | hFVIII-F309S-BD226-Codop-run4-seq102-Afstyla-BDD-F309S \|\| PacI_site \|\| |
| | WPRE_3pUTR \|\| bGH |
| 1838 | 3x hSerpEnh_VD _TTRe_PromoterSet \|\| 5pUTR-constant, 5pUTR-325243 \|\| |
| | FVIII_SC_F309_codop_1b \|\| PacI_site \|\| WPRE_3pUTR \|\| bGH |
| 1840 | 3x hSerpEnh_VD _TTRe_PromoterSet \|\| 5pUTR-constant, 5pUTR-325243 \|\| |
| | FVIII_SC_F309_codop_3b \|\| PacI_site \|\| WPRE_3pUTR \|\| bGH |
| 1841 | 3x hSerpEnh_VD _TTRe_PromoterSet \|\| 5pUTR-constant, 5pUTR-325243 \|\| |
| | FVIII_SC_F309S_codop_3b \|\| PacI_site \|\| WPRE_3pUTR \|\| bGH |
| 1886 | 3x hSerpEnh_VD _TTRe_PromoterSet_v2 \|\| PmeI_site \|\| Consensus_Kozak \|\| hFVIII- |
| | F309S-BD226-Codop-run4-seq102-Afstyla-BDD-F309S \|\| PacI_site \|\| |
| | WPRE_3pUTR \|\| bGH |
| 1921 | 1x hSerEnh_VD_PromoterSet \|\| PmeI_site \|\| Consensus_Kozak \|\| FVIII-SC_5_ORF \|\| |
| | PacI_site \|\| WPRE_3pUTR \|\| bGH |
| 1922 | 1x hSerpEnh_VD_PromoterSet \|\| PmeI_site \|\| Consensus_Kozak \|\| FVIII- |
| | SC_5k_wt3_3_ORF \|\| PacI_site \|\| WPRE_3pUTR \|\| bGH |
| 1930 | 1x hSerpEnh_VD_PromoterSet \|\| PmeI_site \|\| Consensus_Kozak \|\| FVIII- |
| | SC_5_F309S \|\| PacI_site \|\| WPRE_3pUTR \|\| bGH |
| 1931 | 1x hSerpEnh_VD_PromoterSet \|\| PmeI_site \|\| Consensus_Kozak \|\| FVIII- |
| | SC_5k_wt3_3_F309S \|\| PacI_site \|\| WPRE_3pUTR \|\| bGH |
| 1574 | Minimum_Consensus_Kozak, hFIX_Promoter, PmeI_site, Consensus_Kozak, |
| | hFVIII-F309S-BD226-Codop-run4-seq102-Afstyla-BDD, PacI_site, WPRE_3pUTR, |
| | bGH |
| 1628 | CpGmin_hAAT_Promoter_Set, hFVIII-F309S-BD226seq124-Afstyla-BDD, |
| | PacI_site, WPRE_3pUTR, bGH, |
| 1593 | 1x hSerpEnh_VD_PromoterSet, PmeI_site, Consensus_Kozak, FVIII- |
| | 1368ORF_CD33-NS-struct-v2, PacI_site, WPRE_3pUTR, bGH, |
| 1602 | 1x hSerpEnh_VD_PromoterSet, PmeI_site, Consensus_Kozak, |
| | FVIII_1368ORF_Lonz-NS-CAI-v2, PacI_site, WPRE_3pUTR, bGH, |
| 1367 | 1x hSerpEnh_VD_PromoterSet \|\| PmeI_site \|\| Consensus_Kozak \|\| hFVIII-F309S- |
| | BD226-Codop-run4-seq102-Afstyla-BDD-F309S \|\| PacI_site \|\| WPRE_3pUTR \|\| bGH |
| 1620 | CpGmin_hAAT_Promoter_Set \|\| PmeI_site \|\| Consensus_Kozak \|\| hFVIII-F309S- |
| | BD226-Codop-run4-seq102-Afstyla-BDD-F309S \|\| PacI_site \|\| WPRE_3pUTR \|\| bGH |
| 1622 | CpGmin_hAAT_Promoter_Set \|\| PmeI_site \|\| Mod_Minimum_Consensus_Kozak \|\| |
| | hFVIII-F309S-BD226-Codop-run4-seq102-Afstyla-BDD \|\| PacI_site \| |
| | WPRE_3pUTR \|\| bGH |
| 1627 | CpGmin_hAAT_Promoter_Set \|\| PmeI_site \|\| Mod_Minimum_Consensus_Kozak \|\| |
| | hFVIII-F309S-BD226seq124-Afstyla-BDD \|\| PacI_site \|\| WPRE_3pUTR \|\| bGH |
| 1636 | CpGmin_hAAT_Promoter_Set \|\| PmeI_site \|\| Mod_Minimum_Consensus_Kozak \|\| |
| | hFVIII-F309S-BD226seq124-Afstyla-BDD \|\| PacI_site \|\| HBBv3_3pUTR \|\| |
| | SV40_polyA |
| 1648 | 3x SerpEnh VD _TTRe_PromoterSet \|\| Consensus_Kozak \|\| hFVIII-F309S-BD226- |
| | Codop-run4-seq102-Afstyla-BDD-F309S \|\| PacI_site \|\| WPRE_3pUTR \|\| bGH |
| 1695 | CRM8_SERP_enhancer \|\| TTR_liver_specific_Promoter \|\| MVM_intron_post_splice |
| | \|\| PmeI_site \|\| Consensus_Kozak \|\| ceDNA1367_ORF_exon1_hFVIII-F309S-BD226- |
| | Codop-run4-seq102-Afstyla-BDD \|\| HBB_intron1 \|\| ceDNA1367_ORF_exon2- |
| | 26_hFVIII-F309S-BD226-Codop-run4-seq102-Afstyla-BDD \|\| PacI_site \|\| |
| | WPRE_3pUTR \|\| bGH |
| 1696 | CRM8_SERP_enhancer \|\| TTR_liver_specific_Promoter \|\| MVM_intron_post_splice |
| | \|\| PmeI_site \|\| Consensus_Kozak \|\| ceDNA1367_ORF_exon1_hFVIII-F309S-BD226- |
| | Codop-run4-seq102-Afstyla-BDD \|\| F8_intron8 \|\| ceDNA1367_ORF_exon2- |
| | 26_hFVIII-F309S-BD226-Codop-run4-seq102-Afstyla-BDD \|\| PacI_site \|\| |
| | WPRE_3pUTR \|\| bGH |
| 1710 | 1x hSerpEnh_VD_PromoterSet \|\| PmeI_site \|\| Consensus_Kozak \|\| |
| | ceDNA1373_ORF_exon1_ hFVIII-F309S-BD226seq124-Afstyla-BDD \|\| |
| | miniF8_200_5p \|\| Minimum_Consensus_Kozak \|\| miniF8_200_3p \|\| |
| | ceDNA1373_ORF_exon2-26_ hFVIII-F309S-BD226seq124-Afstyla-BDD \|\| |
| | PacI_site \|\| WPRE_3pUTR \|\| bGH |

[0762] FIG. 10 is a schematic detailing a method of insertion of introns into FVIII ORF. Chimeric FVIII intron a with functional splice donor and acceptor sites is inserted at native position of intron 1 into codon optimized FVIII ORF. Intron flanking regions (33 bp) derived from FVIII Wt cDNA sequence were substituted for codon optimized sequence in FVIII CDS.

[0763] FIG. 11 is a schematic detailing a method of insertion of introns into FVIII ORF ceDNA 1373. Chimeric FVIII intron with functional splice donor and acceptor sites inserted at native position of intron 1 into codon optimized FVIII ORF. Enhancer element inserted in between 5p and 3p regions of chimeric intron.

[0764] FIGS. 12A-12B are schematics detailing method of substituting heterologous secretion signal sequences for the native FVIII signal sequence. FIG. 12A shows substitution of native FVIII signal sequence for signal sequence from chymotrypsinogen (CHY-SSv1) ORF. FVIII mature peptide is shown. FIG. 12B shows the sequence of FVIII N-terminus showing signal sequence and mature peptide cleavage site.

[0765] Screening was carried out to determine FVIII activity using the following assays:

### In Vitro Screening Assay:

[0766] Using Lipofectamine p3000 (Thermofisher cat no: L3000001), 24 hours prior to transfection: HepG2 cells were plated in a 96 well collagen coated plate at a density of 20,000 cells/well (100 uL in each well=200,000 cells/mL). On the day of transfection, the media was changed in all cell-containing wells.

[0767] Lipofectamine dilution was prepared as follows: 0.3 uL lipofectamine3000 reagent+10 uL Opti-MEM (per well)

[0768] P3000 dilutions was prepared as follows: 10 uL Opti-MEM+0.4 uL p3000 (per well)

[0769] 800 ng DNA was plated into single wells of a 96 well prep-plate.

[0770] 21 uL of the L3000 dilution and 21 uL of the P3000 dilutions were added to each DNA-containing well, and gently mixed, followed by incubation at room temperature (RT) for 15 minutes. 10 uL/well of the L3000 and P3000 mixture was added to the cells in triplicate, followed by incubation for 72 hours at 37 C, 5% CO2, humidified air.

[0771] 72 hours after transfection, supernatant media was collected into equal volume aliquots into 2×96 W storage plates and either frozen immediated or used in the Chromogenix FVIII Activity assay.

### Chromogenix FVIII Activity Assay:

[0772] The chromogenic assay to determine FVIII activity was carried out as follows: Kit components were allowed to acclimate to room temperature from 4 C before use. The lyophilized kit components were reconstituted with sterile water: 3 mL per Factor Reagent (green cap) and 6 mL to the S-2765+I-2581 Reagent (white cap). The Technoclone Coagulation Reference was reconstituted with 1 mL sterile water and allow to mix slowly on a rocker for 15 min before use. Samples are diluted as follows: 5 uL sample+400 uL buffer in a 96 W block.

[0773] Standard (coagulation reference) was prepared in the 96 W block as seen on “extended curve” tab. Samples and standards were plated on the 384 W plate using the 125 uL Voyager Pipette: 10 uL each. Reconstituted Factor Reagent (green cap) and S-2765+I-2581 (white cap) was prewarmed from the kit at 37 C. Plate was uncubated at 37° C. for 4 min.

[0774] Next, 10 uL Factor Reagent was added to each well, using the 50 uL pipette, leaving 10 seconds between row additions to maintain incubation times. Plate was incubated at 37 C for 4 min. 10 uL S-2765+I-2581 was added to each well, using the 50 uL pipette, leaving 10 seconds between row additions to maintain incubation times. Plate was incubated at 37 C for 10 min. 10 uL acetic acid (20%) was added as a stop solution to each well, using the 50 uL pipette, leaving 10 seconds between row additions to maintain incubation times. Plate absorbance was read on M3 at 405 nm.

[0775] Analysis was performed as follows: After reading on M3, data was exported to Excel for processing. All raw absorbance values were normalized to the 0 IU/mL standard wells (average the 2 wells, then subtract that averaged value from each other well value). Normalized values were plugged into GraphPad Prism, XY table format. Values of IU/mL for FVIII standards were added with their normalized absorbance value. Unknowns were added—the sample name and the normalized absorbance values.

[0776] Data was processed as follows: “transform concentrations (x)” à transform to log (log(10)); XY analysis à “nonlinear regression (curve fit)” à “asymmetric 5 parameter, X is log(concentration); go to “interpolated X mean values” tab à analyze à transform à standard functions and “transform Y values using: Y=10\hat{ }Y” AND check off “create new graph of the results”; this gives the processed and interpolated IU/mL values for the unknowns (samples).

### Example 7: Study to Determine FVIII Expression after Hydrodynamic ceDNA Delivery in Male FVIII Knockout Mice

[0777] A well-known method of introducing nucleic acid to the liver in rodents is by hydrodynamic tail vein injection. In this system, the pressurized injection in a large volume of non-encapsulated nucleic acid results in a transient increase in cell permeability and delivery directly into tissues and cells. This provides an experimental mechanism to bypass many of the host immune systems, such as macrophage delivery, providing the opportunity to observe delivery and expression in the absence of such activity

[0778] A hydrodynamic delivery system was used to test the effect of various ceDNA vectors expressing FVIII on serum FVIII levels, where detection of FVIII in the serum indicated that the ceDNA vector was able to express FVIII after injection.

[0779] ceDNA vectors as described in Example 6 were employed. SEQ ID NOs for the ceDNA constructs are shown in Table 18, and a description of the constructs is provided in Table 20. Test materials for each study are shown in the Tables 21-23, below

TABLE 21
Study 1

| | Animals | | Dose | | | Terminal |
|---|---|---|---|---|---|---|
| Group | per | | Level | Dose | Treatment | Time |
| No. | Group | Treatment | (μg) | Volume | Regimen, IV | Point |
| 1 | 4 | PBS | 1.0 | 90-100 | Once on | Day 7 |
| 2 | 4 | ceDNA1362 | | ml/kg | Day 0 by IV | |
| 3 | 4 | ceDNA1367 | | (set | Hydrodynamic | |
| 4 | 4 | ceDNA1368 | | volume) | | |
| 5 | 4 | ceDNA1373 | | | | |
| 6 | 4 | ceDNA1374 | | | | |
| 7 | 4 | ceDNA1361 | | | | |
| 8 | 4 | ceDNA1265 | | | | |
| 9 | 4 | ceDNA1270 | | | | |
| 10 | 4 | ceDNA 692 | | | | |

TABLE 22
Study 2

| | Animals | | Dose | | | Terminal |
|---|---|---|---|---|---|---|
| Group | per | | Level | Dose | Treatment | Time |
| No. | Group | Treatment | (μg) | Volume | Regimen, IV | Point |
| 1 | 4 | PBS | 1.0 | 90-100 | Once on | Day 7 |
| 2 | 4 | ceDNA694 | | ml/kg | Day 0 by IV | |
| 3 | 4 | ceDNA1320 | | (set | Hydrodynamic | |
| 4 | 4 | ceDNA704 | | volume) | | |
| 5 | 4 | ceDNA1260 | | | | |
| 6 | 4 | ceDNA1258 | | | | |
| 7 | 4 | ceDNA933 | | | | |
| 8 | 4 | ceDNA1259 | | | | |
| 9 | 4 | ceDNA1270 | | | | |
| 10 | 4 | ceDNA1257 | | | | |

TABLE 23
Study 3

| | No. | | | Dose | Dose | Dosing | Terminal |
|---|---|---|---|---|---|---|---|
| Group | of | | Test | Levels | Volume | Regimen | Time |
| No. | Animals | Strain | Material | (μg/an) | (mL/kg) | ROA | Point |
| 1 | 4 | CD-1 | PBS | NA | 90-100 | Once on | Day 3 |
| 2 | 4 | | ceDNA692 | 5 | ml/kg | Day 0 by IV | |
| 3 | 4 | | ceDNA1362 | 5 | (set | Hydrodynamic | |
| 4 | 4 | | ceDNA1368 | 5 | volume) | | |
| 5 | 4 | | ceDNA1374 | 5 | | | |
| 6 | 4 | | ceDNA1918 | 5 | | | |
| 7 | 4 | | ceDNA1919 | 5 | | | |
| 8 | 4 | | ceDNA1920 | 5 | | | |
| 9 | 4 | | ceDNA1922 | 5 | | | |
| 10 | 4 | | ceDNA1923 | 5 | | | |

[0780] Test articles were supplied in a concentrated stock, and stored at nominally 4° C. Formulations were not vortexed or centrifuged. Groups were housed in clear polycarbonate cages with contact bedding on a ventilated rack in a procedure room. Food and filtered tap water acidified with 1N HCl to a targeted pH of 2.5-3.0 were provided to the animals ad libitum. Blood was collected at interim and terminal time points as set forth below in Tables 24-26.

TABLE 24
Study 1 and 2 Interim and terminal collection

| | Sample Collection Times | |
|---|---|---|
| | | Terminal Whole Blood |
| Group | Whole Blood (orbital) | (cardiac) |
| Number | Sodium Citrate Plasma | |
| 1-10 | Day 3 | Day 7 |
| | 72 hours ± 50% post dose | |
| Volume/ | 120 μL whole blood | MOV |
| Portion | | |
| Processing/ | 120 μL whole blood was added to tube pre- | 600 μL whole blood was added to tube pre- |
| Storage | coated with 13.33 μL of 3.2% sodium citrate | coated with 66.6 μL of 3.2% sodium citrate |
| | and kept ambient until processed | and kept ambient until processed |
| | One (1) aliquot of plasma | Three (3) aliquots of plasma |
| | Frozen at nominally −70° C. | Frozen at nominally −70° C. |

TABLE 25
Study 3 Blood Collection (Interim): All animals in Groups 1-10
hadinterim blood collected on Day 1; 24 hours post Test Material
dose (+5%)

| | Sample Collection Times |
|---|---|
| | Whole Blood |
| Group | (orbital only) |
| Number | Sodium Citrate Plasma |
| 1-10 | Day 1 |
| | 24 hours post Test Material dose (±5%) |
| Volume/ | 120 μL whole blood |
| Portion | |
| Processing/ | 120 μL whole blood was added to tube pre-coated with |
| Storage | 13.33 μL of 3.2% sodium citrate and kept ambient until |
| | processed |
| | Two (2) aliquots of plasma |
| | Frozen at nominally −70° C. |

TABLE 26
Study 3 Terminal Collection

| | Sample Collection Times |
|---|---|
| | Terminal Whole Blood |
| Group | (cardiac) |
| Number | Sodium Citrate Plasma |
| 1-10 | Day 3 |
| Volume/ | MOV |
| Portion | |
| Processing | 600 μL whole blood was added to tube pre-coated with |
| | 66.6 μL of 3.2% sodium citrate and kept ambient until |
| | processed |
| | Four (4) aliquots processed plasma |
| Storage | Frozen samples at nominally −70° C. |

MOV = maximum obtainable volume

Study details are provided as follows:

[0781] Species (number, sex, age): FVIII KO (B6;129S-F8<tm1Kaz>/J) mice (N=40+4 spare, male, ˜4 weeks of age at arrival) from Jackson Laboratories.

[0782] Cage Side Observations: Cage side observations were performed daily.

[0783] Clinical Observations: Clinical observations were performed ˜1, ˜5-6 and ˜24 hours post the Day 0 Test Material dose.

[0784] Body Weights: Body weight for all animals was recorded on Days 0, 3 and 7, including prior to euthanasia.

[0785] Dose Formulation: Test articles were supplied in a concentration stock. Stock was diluted with PBS immediately prior to use. Prepared materials were stored at ˜4° C. (or on wet ice) if dosing was not performed immediately.

[0786] Dose Administration: Test Materials were dosed on Day 0 by hydrodynamic IV administration, at a set volume per animal, 90-100 ml/kg (dependent on the lightest animal in the group) via lateral tail vein (dosed within 5 seconds). After each collection, animals received 0.5-1.0 mL lactated Ringer's, subcutaneously. For plasma collections, whole blood was collected into non-coated Eppendorf style tubes via orbital sinus puncture under anesthesia per facility SOPS. Immediately 120 μL was withdrawn and placed into tubes containing 13.33 μL of 3.2% sodium citrate. Blood was gently mixed and maintained ambient until processed. Whole blood samples were centrifuged at 2,000 g for 15 minutes under ambient conditions (20-25° C.). Plasma samples were withdrawn avoiding the cell pack. One (1) aliquot was made and any clotting in the whole blood sample or hemolysis in the plasma was noted. Samples were stored at nominally −70° C. until analysis.

[0787] Anesthesia Recovery: Animals were monitored continuously while under anesthesia, during recovery and until mobile.

[0788] Euthanasia & Terminal Blood Collection: On Day 7, animals were euthanized by CO₂ asphyxiation followed by thoracotomy and exsanguination. Maximum obtainable blood volume was collected by cardiac puncture and processed to plasma. No other tissues were be collected.

[0789] For plasma collections, whole blood was collected by syringe and 600 μL placed immediately tubes containing 66.66 μL of 3.2% sodium citrate. Blood was gently mixed and maintained ambient until processed. Whole blood samples were centrifuged at 2,000 g for 15 minutes under ambient conditions (20-25° C.). Plasma samples were withdrawn avoiding the cell pack and three (3) aliquots made. Any clotting in the whole blood sample or hemolysis in the plasma were noted. All plasma samples were stored at nominally −70° C. shipped until analysis.

[0790] Results: FIG. 13 shows a schematic of B-domain selection for the constructs described herein. Briefly, selection of FVIII protein sequences in clinical use was prioritized to minimize immunogenicity risk. Through ELISA and chromagenic assay analysis (data not shown), FVIII-SC was found to be a favored FVIII protein sequence. In FVIII-SC, the heavy and light chains are covalently linked, and this construct shows increased affinity to von Willbrand factor (VFW), which reduces binding to antigen presenting cells (APCs), improving stability and immunogenicity in vitro.

[0791] A comparison was done between the ELISA assay method and the chromogenic assay method to determine if one method produced more reliable results than another in determining FVIII activity. In particular, it was found that the ELISA used to measure plasma human FVIII in WT mice underpredicted FVIII activity for constructs with a short or deleted B domain (SQ and SC-1373[SC/F309S]). However, good concordance was found between the ELISA and activity only v226 constructs (1270 [v226/F309S]). Therefore, it was concluded that comparisons can only be made between constructs with the same B-domain in studies that used the ELISA assay (hydrodynamic studies in CD-1 or C57bl/6 mice), but among the constructs with different type of B-domain or different optimized sequence. The chromogenic assay assay appeared to provide more consistent results. Exemplary results are shown in FIG. 14.

### Example 8: Study to Determine FVIII Expression after Hydrodynamic ceDNA Delivery in Male CD-1 and FVIII KO Mice

[0792] A hydrodynamic delivery system was used to test the effect of various ceDNA vectors expressing FVIII on serum FVIII levels, where detection of FVIII in the serum indicated that the ceDNA vector was able to express FVIII after injection.

[0793] ceDNA vectors as described in Example 6 were employed. SEQ ID NOs for the ceDNA constructs are shown in Table 18, and a description of the constructs is provided in Table 20. Test materials for the study are shown in Table 27 below.

TABLE 27
Study 4

| | No. | | | Dose | Dose | Dosing | Terminal |
|---|---|---|---|---|---|---|---|
| Group | of | | Test | Levels | Volume | Regimen | Time |
| No. | Animals | Strain | Material | (μg/an) | (mL/kg) | ROA | Point |
| 1 | 3 | CD-1 | PBS | NA | 90-100 | Once on | Day 3 |
| 2 | 3 | | ceDNA1373 | 0.01 | ml/kg | Day 0 by IV | |
| 3 | 3 | | ceDNA1373 | 0.1 | (set | Hydrodynamic | |
| 4 | 3 | | ceDNA1373 | 1.0 | volume) | | |
| 5 | 3 | | ceDNA1374 | 0.01 | | | |
| 6 | 3 | | ceDNA1374 | 0.1 | | | |
| 7 | 3 | | ceDNA1374 | 1.0 | | | |
| 8 | 3 | FVIII | PBS | NA | | | |
| 9 | 3 | KO | ceDNA1270 | 0.01 | | | |
| 10 | 3 | | ceDNA1270 | 0.1 | | | |
| 11 | 3 | | ceDNA1270 | 1.0 | | | |
| 12 | 3 | | ceDNA1373 | 0.01 | | | |
| 13 | 3 | | ceDNA1373 | 0.1 | | | |
| 14 | 3 | | ceDNA1373 | 1.0 | | | |
| 15 | 1 | CD-1 | ceDNA1373 | 1.0 | | | Day 1 |

No. = Number;
IV = intravenous;
ROA = route of administration;
min = minute;
hr = hour

[0794] Test articles were supplied in a concentrated stock, and stored at nominally 4° C. Formulations were not vortexed or centrifuged. Groups were housed in clear polycarbonate cages with contact bedding on a ventilated rack in a procedure room. Food and filtered tap water acidified with 1N HCl to a targeted pH of 2.5-3.0 were provided to the animals ad libitum. Blood was collected at interim and terminal time points as set forth in Table 28 below.

TABLE 28
Study 4 Terminal collection

| | Sample Collection Times | | |
|---|---|---|---|
| | Terminal Whole Blood | | |
| Group | (cardiac) | | |
| Number | Sodium Citrate Plasma | Liver | Liver |
| 1-14 | Day 3 | | |
| 15 | | | Day 1 |
| Volume/ | MOV | Whole organ, weighed then | Whole organ |
| Portion | | divided | |
| | | 4 x ~20-30 mg pieces weighed | |
| Processing | 600 μL whole blood was added to | Snap frozen individually | Placed in cold PBS |
| | tube pre-coated with 66.6 μL of | (Lake Pharma) | No processing |
| | 3.2% sodium citrate and kept | | |
| | ambient until processed | | |
| | Three (3) aliquots processed | | |
| | plasma | | |
| Storage | Frozen samples at nominally −70° C. | | Send Same Day on |
| | | | WET ICE |

MOV = maximum obtainable volume

[0795] Study details are provided as follows:

[0796] Species (number, sex, age): FVIII KO (B6;129S-F8<tm1Kaz>/J) mice (N=40+4 spare, male, ˜4 weeks of age at arrival) from Jackson Laboratories. CD-1, 22 plus 1 spare. 4 weeks at age of arrival.

[0797] Cage Side Observations: Cage side observations were performed daily.

[0798] Dose Formulation: Test articles were supplied in a concentration stock. Stock was diluted with PBS immediately prior to use. Prepared materials were stored at ˜4° C. (or on wet ice) if dosing was not performed immediately.

[0799] Dose Administration: Test Materials were dosed on Day 0 by hydrodynamic IV administration, at a set volume per animal, 90-100 ml/kg (dependent on the lightest animal in the group) via lateral tail vein (dosed within 5 seconds).

[0800] Whole blood from Groups 1-14 only was collected by syringe and 600 μL placed immediately tubes containing 66.66 μL of 3.2% sodium citrate. Blood was gently mixed and maintained ambient until processed. Whole blood samples were centrifuged at 2,000 g for 15 minutes under ambient conditions (20-25° C.). Plasma samples were withdrawn avoiding the cell pack and three (3) aliquots made. Any clotting in the whole blood sample or hemolysis in the plasma was noted.

[0801] All plasma samples were stored at nominally −70° C. until analysis.

[0802] Perfusion: Following exsanguination, all animals (including Group 15) underwent cardiac perfusion with saline. In brief, whole body intracardiac perfusion was performed by inserting 23/21-gauge needle attached to 10 mL syringe containing saline into the lumen of the left ventricle for perfusion. The right atrium was incised to provide a drainage outlet for perfusate. Gentle and steady pressure was applied to the plunger to perfuse the animal after the needle has been positioned in the heart. Adequate flow of the flushing solution was ensured until the exiting perfusate flows clear (free of visible blood) indicating that the flushing solution has saturated the body and the procedure was complete.

[0803] Tissue Collection: After euthanasia, exsanguination and perfusion, the liver was harvested and whole organ weights were recorded. No whole organ weight was needed for Group 15.

[0804] Groups 1-14 Tissue specifications—From the liver: 4×˜20-30 mg sections (≤30 mg) were collected and weighed. Any remaining liver was discarded. Weighed sections were snap frozen individually, stored at nominally −70° C. until shipped.

[0805] Group 15 Tissue specifications: The whole liver was placed in cold PBS. Sample were stored on wet ice.

[0806] Similar experiments were conducted and repeated using the protocol shown above. Test articles were B domain (SQ) deleted like 692, 693, 694; or v226/F309S like 1270 and 1391; single chain F309S like 1367 and 1373; and single chain FVIII like 1368 and 1374, as described in Tables 18 and 20.

[0807] Result: Various B-domain and secretion mutant combinations of FVIII ceDNA constructs were tested for their ability to express functional FVIII protein. As shown in FIG. 15, FVIII constructs having SC optionally with F309S showed consistently high expression in vitro and in vivo (see, e.g., ceDNA1368, ceDNA1373 and ceDNA1374).

### Example 9: A Study to Determine FVIII Expression after Hydrodynamic ceDNA Delivery in Male CD-1 Mice

[0808] A hydrodynamic delivery system was used to determine FVIII expression after ceDNA delivery using FVIII ceDNA constructs with various elements (e.g., testing different 3′UTRs, promoter-enhancer combinations, introns for effect on FVIII expression). ceDNA vectors as described in Example 6 were employed. SEQ ID NOs for the ceDNA constructs are shown in Table 18, and a description of the constructs is provided in Table 20. Test materials for the study are shown in Tables 29-30 below.

TABLE 29
Study 5

| | No. | | | Dose | Dose | Dosing | Terminal |
|---|---|---|---|---|---|---|---|
| Group | of | | Test | Levels | Volume | Regimen | Time |
| No. | Animals | Strain | Material | (μg/an) | (mL/kg) | ROA | Point |
| 1 | 4 | CD-1 | PBS | NA | 90-100 | Once on | Day 7 |
| 2 | 4 | | ceDNA1367 | 5 | ml/kg | Day 0 by IV | |
| 3 | 4 | | ceDNA1373 | 5 | (set | Hydrodynamic | |
| 4 | 4 | | ceDNA1632 | 5 | volume) | | |
| 5 | 4 | | ceDNA1637 | 5 | | | |
| 6 | 4 | | ceDNA1638 | 5 | | | |
| 7 | 4 | | ceDNA1645 | 5 | | | |
| 8 | 4 | | ceDNA1646 | 5 | | | |
| 9 | 4 | | ceDNA1648 | 5 | | | |
| 10 | 4 | | ceDNA1657 | 5 | | | |

TABLE 30
Study 6

| | No. | | | Dose | Dose | Dosing | Terminal |
|---|---|---|---|---|---|---|---|
| Group | of | | Test | Levels | Volume | Regimen | Time |
| No. | Animals | Strain | Material | (μg/an) | (mL/kg) | ROA | Point |
| 1 | 4 | CD-1 | PBS | NA | 90-100 | Once on | Day 1 |
| 2 | 4 | | ceDNA1270 | 5 | ml/kg | Day 0 by IV | 24 hours post |
| 3 | 4 | | ceDNA1375 | 5 | (set | Hydrodynamic | dose ± |
| 4 | 4 | | ceDNA1377 | 5 | volume) | | 5% |
| 5 | 4 | | ceDNA1378 | 5 | | | |
| 6 | 4 | | ceDNA1381 | 5 | | | |
| 7 | 4 | | ceDNA1387 | 5 | | | |
| 8 | 4 | | ceDNA1391 | 5 | | | |
| 9 | 4 | | ceDNA1647 | 5 | | | |
| 10 | 4 | | ceDNA1374 | 5 | | | |

[0809] Species (number, sex, age): CD-1,40 plus 4 spares. 4 weeks at age of arrival. Remaining study details are similar to those provided in Examples 8 and 9 above. Similar experiments were conducted and repeated to test the effect of the various combinations of promoters-enhancers sets, introns, 3′-UTR on FVIII protein expression. The elements that were tested were as follows:

[0810] FIG. 20 shows the results of FVIII expression from ceDNA having the following promoter sets:
[0811] 1× hSerpEnh_VD_PromoterSet (1× SerpEnh)
[0812] SC: 1362, 1368, 1374, 1918, 1919, 1920, 1921, 1922, 1923, 1593, 1602
[0813] SC/Leader: 1579, 1582, 1585, 1598, 1611, 1612, 1615, 1616
[0814] SC/F309S: 1367, 1373, 1700, 1701, 1708, 1712, 1725, 1930, 1931, 1710
[0815] v226/F309S: 1270, 1391, 1740, 1741, 1742, 1743, 1744
[0816] 3× hSerpEnh_VD_PromoterSet
[0817] SC: 1655
[0818] v226/F309S: 1375, 1381
[0819] 3× hSerpEnh_VD_PromoterSet (5′UTR variant)
[0820] SC: 1652
[0821] SC/F309S: 1657
[0822] 3× hSerpEnh_VD_TTRe_PromoterSet
[0823] SC: 1649, 1651, 1838, 1840, 1841
[0824] SC/F309S: 1648
[0825] v226/F309S: 1647
[0826] 3× hSerpEnh_VD_TTRe_PromoterSet_v2
[0827] SC: 1668
[0828] SC/F309S: 1886
[0829] 3× SerpEnh_VD_TTRe_PromoterSet_v2*
[0830] SC/F309S: 1664
[0831] CpGmin_hAAT_Promoter_Set
[0832] SC/F309S: 1632, 1637, 1638, 1645, 1646, 1620, 1622, 1627, 1636, 1628
[0833] 3×SerpEnh-TTRm
[0834] v226/F309S: 1377, 1378
[0835] hAAT(979)_PromoterSet
[0836] v226/F309S: 1387
[0837] TTR_liver_specific_Promoter
[0838] SC/F309S: 1695, 1696
[0839] hFIX_Promoter
[0840] SC/F309S: 1574
[0841] CpGfree20mer_1, 5×HNF1_ProEnh_10 mer, 3× hSerpEnh_VD_TTRe_PromoterSet_v2
[0842] SC/F309S: 1572

[0843] FIG. 21 shows the results of FVIII expression from ceDNA having the following introns:
[0844] miniF8_50/100: 1700, 1725
[0845] miniF8_200/200: 1701, 1712
[0846] miniF8_500/500: 1708
[0847] HBB_intron1: 1695

[0848] FIG. 19 shows the results of FVIII expression from ceDNA having the following 3′UTRs:
[0849] WPRE_3pUTR, bGH: all constructs tested
[0850] HBBv3_3pUTR, SV40_polyA:
[0851] CpGmin_hAAT, SC/F309S: 1632 (1622), 1636 (1627), 1637 (1627), 1638 (1628)
[0852] hAAT(979), v226/F309S: 1387 (none)
[0853] SV40_polyA:
[0854] CpGmin_hAAT, SC/F309S: 1645 (1622)
[0855] HBBv3_3pUTR:
[0856] CpGmin_hAAT, SC/F309S: 1646 (1622)
[0857] 3×SerpEnh-TTRm_MVM_intron, v226/F309S: 1377 (none)
[0858] bGH:
[0859] 3× hSerpEnh_VD, v226/F309S: 1375 (1381)
[0860] HBBv2_3pUTR, bGH:
[0861] 3×SerpEnh-TTRm_MVM_intron, v226/F309S: 1378

[0862] FIG. 24 shows the results of FVIII expression from ceDNA having the following leader sequences (and their locations):
[0863] Albumin: 1611, 1579
[0864] Gaussia: 1598, 1582
[0865] Secrecon: 1616, 1585
[0866] Chymotrypsinogen: 1612
[0867] Lonza: 1615, 1602
[0868] CD33: 1593
[0869] DTS
[0870] 5′DTS_primer_pad∥5×_kB_mesika_DTS∥3′DTS_primer_pad:
[0871] After 3pUTR: 1740
[0872] Before promotor: 1742
[0873] CpGfree20mer_1∥SV40DNA_DTS_72bpTandemRepeat∥CpGfree20mer_2∥
[0874] SV40DNA_DTS_72bpTandemRepeat∥CpGfree20mer_3∥SV40DNA_DTS_72bpTandemRepeat∥
[0875] CpGfree20mer_4∥SV40DNA_DTS_72bpTandemRepeat∥CpGfree20mer_5∥
[0876] SV40DNA_DTS_72bpTandemRepeat:
[0877] After 3pUTR: 1741
[0878] Before promotor: 1743
[0879] CpGfree20mer_1, CBX3(674mut1)∥20mer_16
[0880] After 3pUTR: 1744 (also has 5pUTR—1738 is comparator)

[0881] Results: FIG. 19 shows the results of FVIII expression from ceDNA having various 3pUTRs and the effects on plasma FVIII concentration (IU/ml) in 1622, 1632, 1645, 1646, 1627, 1636, 1637, 1628, 1638, 1382, 1375, 1377, 1378, and 1387. The studies described above were also carried out, in part, to test various promoter and enhancer combinations, and their effects on plasma FVIII concentration. FIG. 20 describes various promoters and promoter/enhancer combinations employed and tested. FIG. 21 shows the results of intron combination in 1367, 1700, 1701, 1695, 1373, 1708, 1725, 1712 in vitro and in vivo. FIG. 23 shows the results of the effect on FVIII expression from ceDNA having DNA nuclear targeting sequences (DTS) on FVIII expression. FIG. 24 shows the results of the impact of having a leader sequence variation on FVIII expression.

### Example 10: A Study to Evaluate ceDNA Formulations Via IV Delivery in Male C57Bl1/6 Mice

[0882] The following study was carried out to determine protein expression after IV injection of LNP formulated ceDNA. ceDNA1270 was formulated in two different LNPs compositions (LNP formulation1: Ionizable lipid:DSPC:Cholesterol:PEG-Lipid+DSPE-PEG-GalNAc4 (47.5:10.0:39.2:3.3) (designated “DP #1”); and LNP formulation 2: Ionizable lipid:DSPC:Cholesterol:PEG-Lipid+DSPE-PEG2000-GalNAc4 (47.3:10.0:40.5:2.3) (designated “DP #2”). Doses of test material were administered on Day 0 by intravenous dosing into the lateral tail vein. Doses were administered at a dose volume of 5 mL/kg. Doses were rounded to the nearest 0.01 mL. Test materials for the study are shown in Tables 31 and 32 below. ceDNA expressing Factor IX (ceDNA-FIX) was used as an independent control.

TABLE 31

| | No. | | Dose | Dose | Dosing | Terminal |
|---|---|---|---|---|---|---|
| Group | of | Test | Levels | Volume | Regimen | Time |
| No. | Animals | Material | (mg/kg) | (mL/kg) | ROA | Point |
| 1 | 5 | PBS | NA | 5 | Once on | Day 14 |
| 2 | 5 | ceDNA1270 | 0.5 | | Day 0 by IV | |
| 3 | 5 | ceDNA1270 | 2.0 | | | |
| 4 | 5 | ceDNA-FIX | 2.0 | | | |
| 5 | 5 | ceDNA-FIX | 2.0 | | | |
| 6 | 5 | ceDNA-FIX | 2.0 | | | |

TABLE 32

| | No. | | Dose | Dose | Dosing | Terminal |
|---|---|---|---|---|---|---|
| Group | of | Test | Levels | Volume | Regimen | Time |
| No. | Animals | Material | (mg/kg) | (mL/kg) | ROA | Point |
| 1 | 4 | PBS | NA | 5 | Once on | N = 2 on Day 10 |
| | | | | | Day 0 by IV | and N = 2 on Day |
| | | | | | | 57 |
| 2 | 4 | ceDNA1270 | 1.0 | | | Day 10 |
| 3 | 4 | ceDNA1270 | 0.3 | | | Day 10 |
| 4 | 4 | | 1.0 | | | Day 10 |
| 5 | 4 | | 3.0 | | | Day 10 |
| 6 | 4 | ceDNA-FIX | 2.0 | | | Day 57 |

[0883] Species (number, sex, age): C57Bl/6,30 plus 3 spares. 6 weeks at age of arrival. Remaining study details are similar to those provided in Examples 8 and 9 above.

[0884] Clinical observations were performed on Day 0: 60-120 minutes post dose and at the end of the work day (3-6 hours post) and on Day 1: 22-26 hours post the Day 0 Test Material dose. Additional observations were made per exception.

[0885] Results: Mice were administered 1 mg/kg ceDNA1270 in LNP formulation 1 (Ionizable lipid:DSPC:Cholesterol:PEG-Lipid+DSPE-PEG-GalNAc4 (47.5:10.0:39.2:3.3) (DP #1) or 2 mg/kg ceDNA 1270 in LNP formulation 2 (Ionizable lipid:DSPC:Cholesterol:PEG-Lipid+DSPE-PEG2000-GalNAc4 (47.3:10.0:40.5:2.3) (DP #2). FIG. 25 shows that mice treated with ceDNA1270 LNP formulations exhibited increased plasma FVIII as compared to mice treated with vehicles, indicating that ceDNA LNP was successfully targeted to the liver and integrated into cells, resulting in successful expression of FVIII protein.

### Example 11: A Study to Evaluate ceDNA Hydrodynamically Administered Via IV Delivery in Male FVIII KO Mice

[0886] The following studies were carried out to determine protein expression after IV injection of naked ceDNA constructs. SEQ ID NOs for the ceDNA constructs are shown in Table 18, and a description of the constructs is provided in Table 20. Doses of test material were administered on Day 0 by intravenous dosing into the lateral tail vein. Doses were administered at a dose volume of 5 mL/kg. Doses were rounded to the nearest 0.01 mL. Test materials for the study are shown in Tables 33 and 34, below.

TABLE 33

| | No. | | | Dose | Dose | Dosing | Terminal |
|---|---|---|---|---|---|---|---|
| Group | of | | Test | Levels | Volume | Regimen | Time |
| No. | Animals | Strain | Material | (mg/kg) | (mL/kg) | ROA | Point |
| 1 | 2 | FVIII KO | PBS | NA | 5 | Once on | Day 10 |
| 2 | 5 | | | 0.3 | | Day 0 by IV | |
| 3 | 5 | | ceDNA1270 | 1.0 | | | |
| 4 | 5 | | | 2.0 | | | |
| 5 | 5 | | ceDNA1368 | 1.0 | | | |
| 6 | 5 | | | 2.0 | | | |
| 7 | 5 | | | 3.0 | | | |
| 8 | 5 | | ceDNA1923 | 0.3 | | | |
| 9 | 5 | | | 1.0 | | | |
| 10 | 5 | | | 2.0 | | | |
| 11 | 5 | | ceDNA1651 | 0.3 | | | |
| 12 | 5 | | | 1.0 | | | |
| 13 | 5 | | | 2.0 | | | |

No. = Number;
IV = intravenous;
ROA = route of administration;
min = minute;
hr = hour

[0887] Species (number sex, age): FVIII KO (B6;129S-F8<tm1Kaz>/J), 62 plus 3 spares. 4-8 weeks at age of arrival. Remaining study details are similar to those provided in Examples 8 and 9 above.

[0888] Clinical observations were performed on Day 0: 60-120 minutes post dose and at the end of the work day (3-6 hours post) and on Day 1: 22-26 hours post the Day 0 Test Material dose.

[0889] Results: As shown in FIG. 26, after 10 days, mice administered ceDNA1270, ceDNA1368, ceDNA1923 or ceDNA1651 constructs at all of the doses tested exhibited increased plasma FVIII concentration. Overall, the increased FVIII plasma concentration was dose dependent. These ceDNA constructs showed a dramatic increase in plasma FVIII concentration ranging from the 0.5 mg/kg dose to the 2.0 mg/kg dose.

### Example 12: A Study to Determine FVIII Transgene Expression after IV LNP:ceDNA Delivery in Male CD-1 and FVIII KO Mice

[0890] The objective of this Study was to determine transgene expression after IV administration of formulated ceDNA. SEQ ID NOs for the ceDNA constructs are shown in Table 18, and a description of the constructs is provided in Table 20. Test materials for the study are shown in the Tables 34-37 below.

TABLE 34
Kinase Inhibitor Administration

| | No. | | | Dose | Dose | Dosing |
|---|---|---|---|---|---|---|
| Group | of | | | Levels | Volume | Regimen |
| No. | Animals | Strain | Inhibitor | (mg/kg) | (mL/kg) | ROA |
| 1 | 4 | CD-1 | Ruxolitinib | 300 | 10 | Day 0 |
| 2 | 4 | | | | | 30 min. pre-dose & |
| 3 | 4 | | | | | 5 hrs post-dose |
| 4 | 4 | | | | | of Test Material by PO |
| 5 | 4 | FVIII | | | | |
| 6 | 4 | KO | | | | |
| 7 | 4 | | | | | |
| 8 | 4 | | | | | |

TABLE 35
Test Material Administration

| | No. | | | Dose | Dose | Dosing | Terminal |
|---|---|---|---|---|---|---|---|
| Group | of | | Test | Levels | Volume | Regimen | Time |
| No. | Animals | Strain | Material | (μg/an) | (mL/kg) | ROA | Point |
| 1 | 4 | CD-1 | PBS | NA | 5 | Once on | Day 14 |
| 2 | 4 | | LNP ceDNA691 | 2 | | Day 0 by IV | |
| 3 | 4 | | LNP ceDNA933 | | | | |
| 4 | 4 | | LNP ceDNA1270 | | | | |
| 5 | 4 | FVIII | LNP ceDNA0933 | | | | |
| 6 | 4 | KO | LNP ceDNA1270 | | | | |
| 7 | 4 | | LNP ceDNA1367 | | | | |
| 8 | 4 | | LNP ceDNA1368. | | | | |

No. = Number;
IV = intravenous;
ROA = route of administration;
min = minute;
hr = hour

TABLE 36
Blood Collection (Interim):

| | Sample Collection Times |
|---|---|
| | Whole Blood |
| Group | (orbital only) |
| Number | Sodium Citrate Plasma |
| 1-8 | Days 4, 7, 10 |
| Volume/ | 120 μL whole blood |
| Portion | |
| Processing | 120 μL whole blood was added to tube pre-coated |
| | with 13.33 μL of 3.2% sodium citrate |
| | and kept ambient until processed |
| | Two (2) aliquots processed plasma |
| Storage | Frozen at nominally −70° C. |

TABLE 37
Blood Collection (Terminal)

| | Sample Collection Times |
|---|---|
| | Terminal Whole Blood |
| Group | (cardiac) |
| Number | Sodium Citrate Plasma |
| 1-8 | Day 14 |
| Volume/ | MOV |
| Portion | |
| Processing | 600 μL whole blood was added to tube pre-coated |
| | with 66.6 μL of 3.2% sodium citrate |
| | and kept ambient until processed |
| | Three (3) aliquots processed plasma |
| Storage | Frozen at nominally −70° C. |

MOV = maximum obtainable volume

[0891] Study details are provided as follows:

[0892] Species (number, sex, age): FVIII KO (B6;129S-F8<tm1Kaz>/J) mice (N=16+2 spare, male, ˜4 weeks of age at arrival) from Jackson Laboratories. CD1. 16+2 spares, male. 4 weeks at time of arrival.

[0893] Cage Side Observations: Cage side observations were performed daily.

[0894] Clinical Observations: Clinical observations were performed ˜1, ˜5-6 and ˜24 hours post the Day 0 Test Material dose, as applicable for remaining groups.

[0895] Body Weights: Body weights for all animals were recorded on Days 0, 1, 2, 4, 7 & 14. Weights were rounded to the nearest 0.1 g. Additional weights were recorded as requested.

[0896] Dose Formulation: Test articles (ceDNA) were supplied in a concentration stock, at 1.0 mg/mL. Stock was warmed to room temperature and diluted with the provided PBS immediately prior to use. Prepared materials may be stored at ˜4° C. if dosing was not performed immediately.

[0897] Inhibitor was supplied in daily ready to dose aliquots; formulated in 0.5% methylcellulose. Formulations were mixed (pipetting) and/or sonicated prior to administration to distribute particulates of oral gavage suspension.

[0898] Dose Administration: Inhibitor was dosed on Day 0 per Table 1 above, by PO administration (oral gavage) at 10 mL/kg. Inhibitor was dosed 30 minutes (±5 minutes) prior to, and 5 hours (±10 minutes) post the Day 0 ceDNA administration. Doses of test material was administered on Day 0 by intravenous dosing into the lateral tail vein. Doses were administered at a dose volume of 5 mL/kg. Doses were rounded to the nearest 0.01 mL.

[0899] Blood collection: All animals in Groups 1-8, had interim blood collected on Days 4, 7 & 10.

[0900] For plasma collections, whole blood was collected into non-coated Eppendorf style tubes via orbital sinus puncture under anesthesia per facility SOPS. Immediately 120 μL was withdrawn and placed into tubes containing 13.33 μL of 3.2% sodium citrate. Blood was gently mixed and maintained ambient until processed. Whole blood samples were centrifuged at 2,000 g for 15 minutes under ambient conditions (20-25° C.). Plasma samples were withdrawn avoiding the cell pack. Two (2) aliquots were made and any clotting in the whole blood sample or hemolysis in the plasma was noted.

[0901] Anesthesia Recovery: Animals were monitored continuously while under anesthesia, during recovery and until mobile.

[0902] Euthanasia & Terminal Blood Collection: On Day 14, animals were euthanized by CO₂ asphyxiation followed by thoracotomy and exsanguination.

[0903] Whole blood was collected by syringe and 600 μL placed immediately tubes containing 66.66 μL of 3.2% sodium citrate. Blood was gently mixed and maintained ambient until processed. Whole blood samples were centrifuged at 2,000 g for 15 minutes under ambient conditions (20-25° C.). Plasma samples were withdrawn avoiding the cell pack and three (3) aliquots made. Any clotting in the whole blood sample or hemolysis in the plasma was noted.

[0904] All plasma samples were stored at nominally −70° C. for analysis.

[0905] Results: FIGS. 16 and 22 show plasma FVIII concentration (IU/mL) at 11 days after administration of the LNP:ceDNAFVIII-vector test articles, as indicated. As shown, FVIII was detected at a much greater level in plasma samples from mice treated with the LNP:ceDNAFVIII-vector 1270, 1367, 1368 test article, compared to the first generation vector 993. FVIII was not observed in mice treated with vehicle only (not shown).

### Example 13: A Study to Determine FVIII Expression after Hydrodynamic ceDNA Delivery in Male FVIII KO Mice

[0906] A hydrodynamic delivery system was used to determine FVIII expression and activity after hydrodynamic injection of ceDNA. ceDNA vectors as described in Example 6 were employed. SEQ ID NOs for the ceDNA constructs are shown in Table 18, and a description of the constructs is provided in Table 20. Test materials for the study are shown in Table 35, below.

TABLE 38

| | No. | | | Dose | Dose | Dosing | Terminal |
|---|---|---|---|---|---|---|---|
| Group | of | | Test | Levels | Volume | Regimen | Time |
| No. | Animals | Strain | Material | (μg/an) | (mL/kg) | ROA | Point |
| 1 | 4 | FVIII KO | PBS | NA | 90-100 | Once on | Day 3 |
| 2 | 4 | | ceDNA1368 | 5 | ml/kg | Day 0 by IV | |
| 3 | 4 | | ceDNA1374 | 5 | (set | Hydrodynamic | |
| 4 | 4 | | ceDNA1652 | 5 | volume) | | |
| 5 | 4 | | ceDNA1838 | 5 | | | |
| 6 | 4 | | ceDNA1840 | 5 | | | |
| 7 | 4 | | ceDNA1922 | 5 | | | |
| 8 | 4 | | ceDNA1923 | 5 | | | |

No. = Number;
IV = intravenous;
ROA = route of administration;
min = minute;
hr = hour

[0907] Species (number, sex, age): FVIII KO (B6;129S-F8<tm1Kaz>/J). 4-8 weeks at age of arrival.

[0908] Remaining study details are similar to those provided in Examples 7 and 8 above.

[0909] Results: FIGS. 17 and 18 show that codon optimized constructs without F309S mutation: i.e., 1368 and its variants such as 1923, 1823, 1840, provides improvements in single chain version of FVIII (“SC”) protein expression. Among these constructs, 1923 demonstrated consistently higher expression over other condon optimized SC FVIII ceDNA constructs.

### Example 14: Evaluation of LNP in Non-Human Primate Tolerability Study

[0910] The objective of this study was to evaluate the tolerability of a 70-minute intravenous infusion of LNP formulated ceDNA to male Cynomolgus monkeys. SEQ ID NOs for the ceDNA constructs are shown in Table 18, and a description of the constructs is provided in Table 20. Test materials for the study are shown in Table 39 below. ceDNA containing a Factor IX expression cassette was used as an independent control.

TABLE 39
Necropsy

| | No. | | | Dose | Cocn. | | Dose | |
|---|---|---|---|---|---|---|---|---|
| Group | of | | | Level | (mg/ | Necropsy | Volume | Dose Route/ |
| No. | Males | Pretreatments | Test Material | mg/kg) | mL) | Timepoint | (mL) | Regimen |
| 1 | 1 | Dexamethasone | ceDNA1270 | 0.3 | 0.06 | 24 hr | 5 | 70 min IV |
| 2 | 2 | and | | 1.0 | 0.2 | Day 14 | | infusion on Day |
| 3 | 1 | Diphenhydramine | ceDNA1270 | 0.3 | 0.06 | 24 hr | | 1 |
| 4 | 2 | 30 minutes prior | | 1.0 | 0.2 | Day 14 | | Infusion rate for |
| 5 | 1 | to dosing | ceDNA-FIX | 0.3 | 0.06 | 24 hr | | first 15 |
| 6 | 2 | | | 1.0 | 0.2 | Day 15 | | minutes: 0.42 |
| 7 | 2 | | | 2.0 | 0.4 | Day 15 | | mL/kg |
| 8 | 1 | | Saline Control | 0 | NA | Day 15 | | Infusion rate for |
| | | | | | | | | the remaining |
| | | | | | | | | 55 minutes: |
| | | | | | | | | 4.59 mL/kg |

[0911] The following study details are provided:

[0912] Animals: Species: Macaca fascicularis; Strain: Cynomolgus macaque; Number of Males: 12; Age: Adult; Research Status: Non-naïve; Weight: ˜2-5 kg; Source: Testing Facility Colony.

[0913] Dose Administration

[0914] Pre-treatment: All animals in Groups 1-8 were administered diphenhydramine (5 mg/kg, IV or IM) and dexamethasone (1 mg/kg, IV or IM) 30 minutes (±3 minutes) prior to the start of dosing.

[0915] Test Article Administration: the test materials were administered by IV infusion to restrained animals in Groups 1-8 over an approximate 70-minute period. Doses were administered through either the saphenous or cephalic vein with a temporary IV catheter. The catheter was flushed with with 0.5 mL of saline at the end of dosing. Dose volumes were calculated based on the most recent body weight and rounded to the nearest 0.1 mL. The end time of IV administration was used to determine target times for blood sample and necropsy collection time points. Injection site, dosing start and finish times were recorded in the raw data. The injection site was marked with indelible ink.

[0916] In-Life Observations and Measurements

[0917] Animal Health Checks: animal health checks were performed at least twice daily, in which all animals were checked for general health.

[0918] Clinical Observations: clinical observations were performed at least once before dosing (Day-1 or 1) and at least once daily thereafter for the duration of the study.

[0919] Body Weights: body weights were recorded prior to dosing on Day-1 and weekly thereafter. Weights were rounded to the nearest 0.1 kg.

[0920] Body Temperature: body temperature was recorded for all animals at predose and at 1, 2, 4, and 6 hours post dose.

[0921] Sample Collection: blood samples were collected from an appropriate peripheral vein (not the vein used for dosing) as indicated in Table 40 below.

TABLE 40

| | | | | | | | | | | FVIII and |
|---|---|---|---|---|---|---|---|---|---|---|
| Group | | | Complement | | Liver Enzymes | | | | Whole Blood | FIX |
| No. | Cytokines | | Analysis | | (AST, ALT, CK) | | Coagulation | | for qPCR | Expression |
| 1, 3,5 | Pretest, 15 | | Pretest, | | Pretest, 24 hr | | Pretest, 24 hr | | Pretest, 24 hr | N/A |
| | min, 6 hr, 24 | | 15 min, 6 hr, | | | | | | | |
| | hr | | 24 hr | | | | | | | |
| 2, 4, 6-8 | Pretest, 15 | | Pretest, | | Pretest, 24 hr, | | Pretest, 24 hr, | | Pretest, 24 hr, | Day 5, 7 and 14 |
| | min, 6 hr, 24 | | 15 min, 6 hr, | | Day 14 or 15 | | Day 14 or 15 | | Day 14 or 15 | or 15 |
| | hr | | 24 hr | | | | | | | |
| Additive | SST | | K2EDTA | | SST | | Sodium | | K2EDTA | Sodium |
| | | | | | | | Citrate | | | Citrate |
| ~Volume | 0.2 | mL | 0.2 | mL | 0.2 | mL | 1.8 | mL | 1 mL | 1.8 mL |
| of Whole | | | | | | | | | | |
| Blood | | | | | | | | | | |
| Aliquots | 75 | μL | 100 | μL | 80 | μL | 700 | μL | 2~0.5 mL | FVIII: 6 |

aliquots of
150 uL plasma
FIX:
Remainder in
2 aliquots

[0922] Blood Collection for FVIII Expression

[0923] Whole blood samples were collected from a peripheral vein via direct needle puncture into sodium citrate tubes. Blood was gently mixed and maintained ambient until processed. Whole blood samples were centrifuged as soon as practical at 2,000 g for 15 minutes under ambient conditions (20-25° C.). Plasma samples were withdrawn avoiding the cell pack. Any clotting in the whole blood sample or hemolysis in the plasma was noted. Plasma samples were stored at nominally −80° C. until shipment to the Sponsor for analysis.

[0924] Blood Collection for FIX Expression

[0925] Whole blood samples were collected from a peripheral vein via direct needle puncture into sodium citrate tubes. Blood was gently mixed and maintained ambient until processed. Whole blood samples were centrifuged as soon as practical at 2,000 g for 15 minutes under ambient conditions (20-25° C.). Plasma samples were withdrawn avoiding the cell pack.

[0926] Any clotting in the whole blood sample or hemolysis in the plasma was noted. Plasma samples were stored at nominally −80° C. until shipment for analysis.

[0927] Cytokine Analysis

[0928] Whole blood samples were collected from a peripheral vein via direct needle puncture into SST tubes and were processed for serum according to Testing Facility SOP. Serum samples were stored at −80° C. until shipment for analysis.

[0929] Complement Analysis

[0930] Whole blood samples were collected from a peripheral vein via direct needle puncture into K2EDTA tubes were processed for plasma according to Testing Facility SOP. Plasma samples were be stored at −80° C. until shipment for analysis.

[0931] Liver Enzyme Analysis

[0932] Whole blood samples were collected from a peripheral vein via direct needle puncture into SST tubes and were processed for serum according to Testing Facility SOP. Serum samples were analyzed by the Testing Facility laboratory for the liver enzymes ALT, AST and CK using an Alfa Wassermann Ace Axcel.

[0933] Coagulation Analysis

[0934] Whole blood samples were collected from a peripheral vein via direct needle puncture into sodium citrate tubes and were processed for plasma according to Testing Facility SOP. Samples were transferred on wet ice if shipped same day or were stored at −80° C. until transferred to IDEXX Corp for analysis of PTT, aPTT and fibrinogen.

[0935] Whole Blood for qPCR

[0936] Whole blood samples were collected from a peripheral vein via direct needle puncture into K2EDTA tubes and were stored at 4° C. until shipment to LakePharma. Day 14 samples were collected, but not processed unless directed by amendment.

[0937] Necropsy and Tissue Collection

[0938] qPCR:

[0939] Two sets of six samples (12 samples total per tissue) of the following tissues were collected from all animals for qPCR (collection sites outlined below). Only the 24 hr samples were evaluated for qPCR, the Day 14 samples were collected, but not processed.

[0940] Samples weighed at a minimum 25 mg (50 mg preferred, weights to be recorded) each and were snap frozen in liquid nitrogen and stored at nominally −80° C. until analysis.

[0941] Heart: Samples collected from left ventricle.

[0942] Kidney: Both the right and the left kidneys were each be bisected and half was used for histology and the other half were snap frozen for qPCR samples.

[0943] Liver: Samples were collected from a consistent area across animals.

[0944] Lung: The left lobe was processed for histology and the right lobe was snap frozen for qPCR samples.

[0945] Spleen: Samples were collected from a consistent area across animals.

[0946] ISH

[0947] For all animals, the remainder of the liver and spleen were collected and were placed into individually labeled cassettes (size-appropriate to fit cassette), then placed into 10% NBF. Only the 24-hour samples were evaluated for ISH, the Day 14 samples were collected, but not processed.

[0948] Histopathology Tissue Processing

[0949] For animals euthanized at Day 14 only, the remainder of the liver and spleen were processed to the slide stage for paraffin embedded, H&E staining. Slides were processed and then shipped for ISH staining and microscopic evaluation.

### Example 15: A 14-Day Single Dose Intravenous Infusion Toxicity Study of a Lipid Nano Particle Formulation in Cynomolgus Monkeys

[0950] The objective of this study was to determine the toxicity effects of a single IV dose of a lipid nanoparticle ceDNA transgene expression after IV administration of LNP formulated ceDNA to male Cynomolgus monkeys. SEQ ID NOs for the ceDNA constructs are shown in Table 18, and a description of the constructs is provided in Table 20. Test materials for the study are shown in Table 41 below. Dosing was by intravenous infusion (70 minutes±10 minutes) to the saphenous vein (cephalic or tail vein was used, if necessary) dosed at 0.42 mL/kg/hr for 15 min and then escalating to 4.59 mL/kg/hr for 55 min. Prolonged infusion with escalating dosing rate design was necessary to prevent/mitigate infusion reactions. The first day of dosing was designated as day 1. Dosing was performed once on day 1 and was carried out for 15 days.

[0951] Prior to the start of infusion, the catheters were flushed with approximately 2 mL of sterile saline. Next the dosing formulations were administered at 0.42 mL/kg/hr for the first 15 minutes (target time). The infusion pump was stopped, reprogrammed to infuse the remaining dose for an infusion rate of 4.59 mL/kg/hr, for the remaining 55 minutes (target time) of the infusion. An approximate 1.0 mL flush of sterile saline was administered via the catheter after dose administration.

TABLE 41

| | | | Dose | Dose Con- | No. of |
|---|---|---|---|---|---|
| Group | Test | Dose Level | Volumeª | centration | Animals |
| No. | Material | (mg/kg/dose) | (mL/kg) | (mg/mL) | Males^{b} |
| 1 | Vehicle | 0 | 4.31 | 0 | 2 |
| 2 | ceDNA-FIX | 2.0 | 4.31 | 0.46 | 2 |
| 3 | ceDNA-FIX | 2.0 | 4.31 | 0.46 | 2 |
| 4 | ceDNA-FIX | 2.0 | 4.31 | 0.46 | 2 |
| 5 | ceDNA1270 | 1.0 | 4.31 | 0.23 | 1 |
| 6 | ceDNA1270 | 2.0 | 4.31 | 0.46 | 2 |

^{a}Based on the most recent body weight measurement. The first day of dosing was be based on Day 1 body weights.
To mitigate potential infusion reactions, all animals were pretreated approximately 30 ± 5 minutes prior to start of infusion with diphenhydramine and dexamethasone. In addition, all animals received a second dose of diphenhydramine and dexamethasone approximately 4 hours ± 10 minutes post infusion. Diphenhydramine was administered as an intramuscular injection at a dose volume of 0.1 ml/kg to achieve a dose level of 5 mg/kg/dose. Dexamethasone was administered as an intramuscular injection at a dose volume of 0.25 ml/kg to achieve a dose level of 1 mg/kg/dose.

[0952] FIG. 25 shows the results from in vivo studies in mice and non-human primates (NHP) using various ceDNA vectors disclosed herein to express FVIII protein as described in Examples 10, 15 and 16. Non human primates (NHPs) were administered with 1 mg/kg ceDNA 1270 in LNP formulation 1 (Ionizable lipid:DSPC:Cholesterol:PEG-Lipid+DSPE-PEG-GalNAc4 (47.5:10.0:39.2:3.3) (DP #1) or 2 mg/kg ceDNA 1270 in LNP formulation 2 (Ionizable lipid:DSPC:Cholesterol:PEG-Lipid+DSPE-PEG2000-GalNAc4 (47.3:10.0:40.5:2.3) (DP #2). As shown in FIG. 25, it was observed that plasma FVIII concentration (IU/ml) was increased in NHP in the studies described in both Examples 14 (for DP #1) and 15 (for DP #2) as compared to control (vehicle), suggesting that the LNP formulated FVIII ceDNA constructs disclosed herein could be effectively delivered and expressed to increase plasma FVIII protein levels even in non-human primates that may exhibit heightened levels of neutralizing antibodies responses against human FVIII.

[0953] FIG. 27 depicts a chart showing FVIII expression levels using various spacer variants of 3× hSerpEnh (2-mer and 11-mer) and Serpin enhancer sequence variants (e.g., bushbaby Serpin enahancer and Chinese tree shrew Serpin enhancer) as compared to 3× human serpin enhancer as in ceDNA construct 1651 whose FVIII expression is driven be 3× VD promoter set). These constructs are identical except the spacers for hSerpEnh (spacer variants) or the SerpEnh sequence (SerpEnh variants from bushbaby and Chinese tree shrew). One dose of 50 ng plasmid containing FVIII ceDNA sequence was hydrodynamically injected into the tail vein of Rag2 mice on day 0 with a single blood collection performed at day 3 (˜72 hr post dose) followed by FVIII activity measurements. As shown in FIG. 27, FVIII construct having 3× hSerpin enhancers with a spacer of two nucleotides (“2mer” spacers) placed inbetween each hSerpEnh showed higher FVIII expression levels as compared the control construct having 3× VD promoter set with a single nucleotide spacer. Surprisingly, the construct having an 11-nucleotide spacer (3×hSerpEnh_11mer_spacers_v3) exhibited an increased level of FVIII expression as compared to 1 nucleotide spacers or 5 nucleotide spacers (data not shown). Further, three repeats of the bushbaby serpin enhancer sequence as well as Chinese tree shrew Serpin enhancer sequence drove higher levels of FVIII expression as compared to 3× human Serpin enhancer (i.e., 3× VD promoter set), suggesting that these conserved homologous enhancer sequences may have a positive impact on FVIII transcription in the liver.

[0954] FIG. 28 depicts a chart showing the results from an in vivo study in which C57BL/6J mice were hydrodynamically injected with synthetically made FVIII-ceDNA molecules, and FVIII activity was measured at Day 3 in the serum of the treated mice. The ceDNA constructs were: (1) ceDNA construct 10 (wild-type left ITR:left ITR spacer:3× hSerpEnh VD promoter set:Mouse TTR 5′UTR:MVM Intron:hFVIII-F309S_BD226seq124-BDD-F309 ORF which is identical to the ORF sequence of ceDNA 1651:WPRE_3pUTR:bGH:right ITR Spacer:wild-type right ITR; (2) ceDNA construct 60 which is essentially identical to ceDNA construct 10 except that it constains 3×_hSerpEnh-2mer spacer v17; (3) ceDNA construct 61 which is essentially identical to ceDNA construct 10 except that it contains 3×_SerpEnh_11-mer_spacers_v3; (4) ceDNA construct 62 which is essentially identical to ceDNA construct 10 except it has 3×_Bushbaby SerpEnh with adenine (A) spacers (“Aspacers”); and (5) ceDNA construct 39 which is essentially identicalto ceDNA construct 10 except that it contains a truncated right ITR. Consistent with the observations in FIG. 27, ceDNA constructs having the 3× human serpin enhancer with 11mer spacers (3×hSerpEnh_11mer_spacers_v3) and 3× bushbaby serpin enhancers (3×Bushbaby_Aspacers) exhibited equivalent or superior expression profiles in the ceDNA platform as compared to that of 3× VD driving FVIII expression (see, FIG. 27).

[0955] ceDNA construct 10 contains wild-type left ITR:left ITR spacer:3× hSerpEnh VD promoter set:mouse TTR 5′UTR:MVM Intron:hFVIII-F309S_BD226seq124-BDD-F309 ORF identical to the ORF sequence of ceDNA 1651):

(1) WPRE_3pUTR:bGH:right ITR Spacer:
wild-type right ITR as shown below:
(SEQ ID NO: 642)
TGAGCGAGCGAGCGCGCAGAGAGGGAGTGGCCAACTCCATCACTA
GGGGTTCCTTGTAGTTAATGATTAACCCGCCATGCTACTTATCGC
GGCCGCGGGGGAGGCTGCTGGTGAATATTAACCAAGGTCACCCCA
GTTATCGGAGGAGCAAACAGGGGCTAAGTCCACCGGGGGAGGCTG
CTGGTGAATATTAACCAAGGTCACCCCAGTTATCGGAGGAGCAAA
CAGGGGCTAAGTCCACCGGGGGAGGCTGCTGGTGAATATTAACCA
AGGTCACCCCAGTTATCGGAGGAGCAAACAGGGGCTAAGTCCACG
GTACCCACTGGGAGGATGTTGAGTAAGATGGAAAACTACTGATGA
CCCTTGCAGAGACAGAGTATTAGGACATGTTTGAACAGGGGCCGG
GCGATCAGCAGGTAGCTCTAGAGGATCCCCGTCTGTCTGCACATT
TCGTAGAGCGAGTGTTCCGATACTCTAATCTCCCTAGGCAAGGTT
CATATTTGTGTAGGTTACTTATTCTCCTTTTGTTGACTAAGTCAA
TAATCAGAATCAGCAGGTTTGGAGTCAGCTTGGCAGGGATCAGCA
GCCTGGGTTGGAAGGAGGGGGTATAAAAGCCCCTTCACCAGGAGA
AGCCGTCACACAGATCCACAAGCTCCTGAAGAGGTAAGGGTTTAA
GGGATGGTTGGTTGGTGGGGTATTAATGTTTAATTACCTGGAGCA
CCTGCCTGAAATCACTTTTTTTCAGGTTGGTTTAAACGCCGCCAC
CATGCAGATTGAGCTGAGCACCTGCTTCTTCCTGTGCCTGCTGAG
GTTCTGCTTCTCTGCCACCAGGAGATACTACCTGGGGGCTGTGGA
GCTGAGCTGGGACTACATGCAGTCTGACCTGGGGGAGCTGCCTGT
GGATGCCAGGTTCCCCCCCAGAGTGCCCAAGAGCTTCCCCTTCAA
CACCTCTGTGGTGTACAAGAAGACCCTGTTTGTGGAGTTCACTGA
CCACCTGTTCAACATTGCCAAGCCCAGGCCCCCCTGGATGGGCCT
GCTGGGCCCCACCATCCAGGCTGAGGTGTATGACACTGTGGTGAT
CACCCTGAAGAACATGGCCAGCCACCCTGTGAGCCTGCATGCTGT
GGGGGTGAGCTACTGGAAGGCCTCTGAGGGGGCTGAGTATGATGA
CCAGACCAGCCAGAGGGAGAAGGAGGATGACAAGGTGTTCCCTGG
GGGCAGCCACACCTATGTGTGGCAGGTGCTGAAGGAGAATGGCCC
CATGGCCTCTGACCCCCTGTGCCTGACCTACAGCTACCTGAGCCA
TGTGGACCTGGTGAAGGACCTGAACTCTGGCCTGATTGGGGCCCT
GCTGGTGTGCAGGGAGGGCAGCCTGGCCAAGGAGAAGACCCAGAC
CCTGCACAAGTTCATCCTGCTGTTTGCTGTGTTTGATGAGGGCAA
GAGCTGGCACTCTGAAACCAAGAACAGCCTGATGCAGGACAGGGA
TGCTGCCTCTGCCAGGGCCTGGCCCAAGATGCACACTGTGAATGG
CTATGTGAACAGGAGCCTGCCTGGCCTGATTGGCTGCCACAGGAA
GTCTGTGTACTGGCATGTGATTGGCATGGGCACCACCCCTGAGGT
GCACAGCATCTTCCTGGAGGGCCACACCTTCCTGGTCAGGAACCA
CAGGCAGGCCAGCCTGGAGATCAGCCCCATCACCTTCCTGACTGC
CCAGACCCTGCTGATGGACCTGGGCCAGTTCCTGCTGTTCTGCCA
CATCAGCAGCCACCAGCATGATGGCATGGAGGCCTATGTGAAGGT
GGACAGCTGCCCTGAGGAGCCCCAGCTGAGGATGAAGAACAATGA
GGAGGCTGAGGACTATGATGATGACCTGACTGACTCTGAGATGGA
TGTGGTGAGGTTTGATGATGACAACAGCCCCAGCTTCATCCAGAT
CAGGTCTGTGGCCAAGAAGCACCCCAAGACCTGGGTGCACTACAT
TGCTGCTGAGGAGGAGGACTGGGACTATGCCCCCCTGGTGCTGGC
CCCTGATGACAGGAGCTACAAGAGCCAGTACCTGAACAATGGCCC
CCAGAGGATTGGCAGGAAGTACAAGAAGGTCAGGTTCATGGCCTA
CACTGATGAAACCTTCAAGACCAGGGAGGCCATCCAGCATGAGTC
TGGCATCCTGGGCCCCCTGCTGTATGGGGAGGTGGGGGACACCCT
GCTGATCATCTTCAAGAACCAGGCCAGCAGGCCCTACAACATCTA
CCCCCATGGCATCACTGATGTGAGGCCCCTGTACAGCAGGAGGCT
GCCCAAGGGGGTGAAGCACCTGAAGGACTTCCCCATCCTGCCTGG
GGAGATCTTCAAGTACAAGTGGACTGTGACTGTGGAGGATGGCCC
CACCAAGTCTGACCCCAGGTGCCTGACCAGATACTACAGCAGCTT
TGTGAACATGGAGAGGGACCTGGCCTCTGGCCTGATTGGCCCCCT
GCTGATCTGCTACAAGGAGTCTGTGGACCAGAGGGGCAACCAGAT
CATGTCTGACAAGAGGAATGTGATCCTGTTCTCTGTGTTTGATGA
GAACAGGAGCTGGTACCTGACTGAGAACATCCAGAGGTTCCTGCC
CAACCCTGCTGGGGTGCAGCTGGAGGACCCTGAGTTCCAGGCCAG
CAACATCATGCACAGCATCAATGGCTATGTGTTTGACAGCCTGCA
GCTGTCTGTGTGCCTGCATGAGGTGGCCTACTGGTACATCCTGAG
CATTGGGGCCCAGACTGACTTCCTGTCTGTGTTCTTCTCTGGCTA
CACCTTCAAGCACAAGATGGTGTATGAGGACACCCTGACCCTGTT
CCCCTTCTCTGGGGAGACTGTGTTCATGAGCATGGAGAACCCTGG
CCTGTGGATTCTGGGCTGCCACAACTCTGACTTCAGGAACAGGGG
CATGACTGCCCTGCTGAAAGTCTCCAGCTGTGACAAGAACACTGG
GGACTACTATGAGGACAGCTATGAGGACATCTCTGCCTACCTGCT
GAGCAAGAACAATGCCATTGAGCCCAGGAGCTTCAGCCAGAATAG
CAGGCACCCCAGCACCAGGCAGAAGCAGTTCAATGCCACCACCAT
CCCAGAGAATACCACCCTGCAGTCTGACCAGGAGGAGATTGACTA
TGATGACACCATCTCTGTGGAGATGAAGAAGGAGGACTTTGACAT
CTACGACGAGGACGAGAACCAGAGCCCCAGGAGCTTCCAGAAGAA
GACCAGGCACTACTTCATTGCTGCTGTGGAGAGGCTGTGGGACTA
TGGCATGAGCAGCAGCCCCCATGTGCTGAGGAACAGGGCCCAGTC
TGGCTCTGTGCCCCAGTTCAAGAAGGTGGTGTTCCAGGAGTTCAC
TGATGGCAGCTTCACCCAGCCCCTGTACAGAGGGGAGCTGAATGA
GCACCTGGGCCTGCTGGGCCCCTACATCAGGGCTGAGGTGGAGGA
CAACATCATGGTGACCTTCAGGAACCAGGCCAGCAGGCCCTACAG
CTTCTACAGCAGCCTGATCAGCTATGAGGAGGACCAGAGGCAGGG
GGCTGAGCCCAGGAAGAACTTTGTGAAGCCCAATGAAACCAAGAC
CTACTTCTGGAAGGTGCAGCACCACATGGCCCCCACCAAGGATGA
GTTTGACTGCAAGGCCTGGGCCTACTTCTCTGATGTGGACCTGGA
GAAGGATGTGCACTCTGGCCTGATTGGCCCCCTGCTGGTGTGCCA
CACCAACACCCTGAACCCTGCCCATGGCAGGCAGGTGACTGTGCA
GGAGTTTGCCCTGTTCTTCACCATCTTTGATGAAACCAAGAGCTG
GTACTTCACTGAGAACATGGAGAGGAACTGCAGGGCCCCCTGCAA
CATCCAGATGGAGGACCCCACCTTCAAGGAGAACTACAGGTTCCA
TGCCATCAATGGCTACATCATGGACACCCTGCCTGGCCTGGTGAT
GGCCCAGGACCAGAGGATCAGGTGGTACCTGCTGAGCATGGGCAG
CAATGAGAACATCCACAGCATCCACTTCTCTGGCCATGTGTTCAC
TGTGAGGAAGAAGGAGGAGTACAAGATGGCCCTGTACAACCTGTA
CCCTGGGGTGTTTGAGACTGTGGAGATGCTGCCCAGCAAGGCTGG
CATCTGGAGGGTGGAGTGCCTGATTGGGGAGCACCTGCATGCTGG
CATGAGCACCCTGTTCCTGGTGTACAGCAACAAGTGCCAGACCCC
CCTGGGCATGGCCTCTGGCCACATCAGGGACTTCCAGATCACTGC
CTCTGGCCAGTATGGCCAGTGGGCCCCCAAGCTGGCCAGGCTGCA
CTACTCTGGCAGCATCAATGCCTGGAGCACCAAGGAGCCCTTCAG
CTGGATCAAGGTGGACCTGCTGGCCCCCATGATCATCCATGGCAT
CAAGACCCAGGGGGCCAGGCAGAAGTTCAGCAGCCTGTACATCAG
CCAGTTCATCATCATGTACAGCCTGGATGGCAAGAAGTGGCAGAC
CTACAGGGGCAACAGCACTGGCACCCTGATGGTGTTCTTTGGCAA
TGTGGACAGCTCTGGCATCAAGCACAACATCTTCAACCCCCCCAT
CATTGCCAGATACATCAGGCTGCACCCCACCCACTACAGCATCAG
GAGCACCCTGAGGATGGAGCTGATGGGCTGTGACCTGAACAGCTG
CAGCATGCCCCTGGGCATGGAGAGCAAGGCCATCTCTGATGCCCA
GATCACTGCCAGCAGCTACTTCACCAACATGTTTGCCACCTGGAG
CCCCAGCAAGGCCAGGCTGCACCTGCAGGGCAGGAGCAATGCCTG
GAGGCCCCAGGTCAACAACCCCAAGGAGTGGCTGCAGGTGGACTT
CCAGAAGACCATGAAGGTGACTGGGGTGACCACCCAGGGGGTGAA
GAGCCTGCTGACCAGCATGTATGTGAAGGAGTTCCTGATCAGCAG
CAGCCAGGATGGCCACCAGTGGACCCTGTTCTTCCAGAATGGCAA
GGTGAAGGTGTTCCAGGGCAACCAGGACAGCTTCACCCCTGTGGT
GAACAGCCTGGACCCCCCCCTGCTGACCAGATACCTGAGGATTCA
CCCCCAGAGCTGGGTGCACCAGATTGCCCTGAGGATGGAGGTGCT
GGGCTGTGAGGCCCAGGACCTGTACTGATTAATTAAGAGCATCTT
ACCGCCATTTATTCCCATATTTGTTCTGTTTTTCTTGATTTGGGT
ATACATTTAAATGTTAATAAAACAAAATGGTGGGGCAATCATTTA
CATTTTTAGGGATATGTAATTACTAGTTCAGGTGTATTGCCACAA
GACAAACATGTTAAGAAACTTTCCCGTTATTTACGCTCTGTTCCT
GTTAATCAACCTCTGGATTACAAAATTTGTGAAAGATTGACTGAT
ATTCTTAACTATGTTGCTCCTTTTACGCTGTGTGGATATGCTGCT
TTATAGCCTCTGTATCTAGCTATTGCTTCCCGTACGGCTTTCGTT
TTCTCCTCCTTGTATAAATCCTGGTTGCTGTCTCTTTTAGAGGAG
TTGTGGCCCGTTGTCCGTCAACGTGGCGTGGTGTGCTCTGTGTTT
GCTGACGCAACCCCCACTGGCTGGGGCATTGCCACCACCTGTCAA
CTCCTTTCTGGGACTTTCGCTTTCCCCCTCCCGATCGCCACGGCA
GAACTCATCGCCGCCTGCCTTGCCCGCTGCTGGACAGGGGCTAGG
TTGCTGGGCACTGATAATTCCGTGGTGTTGTCTGTGCCTTCTAGT
TGCCAGCCATCTGTTGTTTGCCCCTCCCCCGTGCCTTCCTTGACC
CTGGAAGGTGCCACTCCCACTGTCCTTTCCTAATAAAATGAGGAA
ATTGCATCGCATTGTCTGAGTAGGTGTCATTCTATTCTGGGGGGT
GGGGTGGGGCAGGACAGCAAGGGGGAGGATTGGGAAGACAATAGC
AGGCATGCTGGGGATGCGGTGGGCTCTATGGCTCTAGAGCATGGC
TACGTAGATAAGTAGCATGGCGGGTTAATCATTAACTACACCTGC
AGGAGGAACCCCTAGTGATGGAGTTGGCCACTCCCTCTCTGCGCG
CTCGCTCGCTCA
(2) ceDNA construct 60 constains
3x_hSerpEnh-2mer spacer v17
(SEQ ID NO: 643)
TGAGCGAGCGAGCGCGCAGAGAGGGAGTGGCCAACTCCATCACTA
GGGGTTCCTTGTAGTTAATGATTAACCCGCCATGCTACTTATCGC
GGCCGCGGGGGAGGCTGCTGGTGAATATTAACCAAGGTCACCCCA
GTTATCGGAGGAGCAAACAGGGGCTAAGTCCACCTGGGGGAGGCT
GCTGGTGAATATTAACCAAGGTCACCCCAGTTATCGGAGGAGCAA
ACAGGGGCTAAGTCCACAAGGGGGAGGCTGCTGGTGAATATTAAC
CAAGGTCACCCCAGTTATCGGAGGAGCAAACAGGGGCTAAGTCCA
CGGTACCCACTGGGAGGATGTTGAGTAAGATGGAAAACTACTGAT
GACCCTTGCAGAGACAGAGTATTAGGACATGTTTGAACAGGGGCC
GGGCGATCAGCAGGTAGCTCTAGAGGATCCCCGTCTGTCTGCACA
TTTCGTAGAGCGAGTGTTCCGATACTCTAATCTCCCTAGGCAAGG
TTCATATTTGTGTAGGTTACTTATTCTCCTTTTGTTGACTAAGTC
AATAATCAGAATCAGCAGGTTTGGAGTCAGCTTGGCAGGGATCAG
CAGCCTGGGTTGGAAGGAGGGGGTATAAAAGCCCCTTCACCAGGA
GAAGCCGTCACACAGATCCACAAGCTCCTGAAGAGGTAAGGGTTT
AAGGGATGGTTGGTTGGTGGGGTATTAATGTTTAATTACCTGGAG
CACCTGCCTGAAATCACTTTTTTTCAGGTTGGTTTAAACGCCGCC
ACCATGCAGATAGAGCTCAGCACCTGCTTCTTCCTGTGCCTCCTC
AGGTTCTGCTTCTCTGCCACCAGGAGATACTACCTGGGGGCTGTG
GAGCTGAGCTGGGACTACATGCAGTCTGACCTGGGGGAGCTGCCT
GTGGACGCCAGGTTCCCCCCCAGAGTGCCCAAGAGCTTCCCCTTC
AACACCTCTGTGGTGTACAAGAAGACCCTGTTTGTGGAGTTCACT
GACCACCTGTTCAACATTGCCAAGCCCAGGCCCCCCTGGATGGGC
CTGCTGGGCCCCACCATCCAGGCTGAGGTGTATGACACTGTGGTG
ATCACCCTGAAGAACATGGCCAGCCACCCTGTGAGCCTGCATGCT
GTGGGGGTGAGCTACTGGAAGGCCTCTGAGGGGGCTGAGTATGAT
GACCAGACCAGCCAGAGGGAGAAGGAGGATGACAAGGTGTTCCCT
GGGGGCAGCCACACCTATGTGTGGCAGGTGCTGAAGGAGAATGGC
CCCATGGCCTCTGACCCCCTGTGCCTGACCTACAGCTACCTGAGC
CATGTGGACCTGGTGAAGGACCTGAACTCTGGCCTGATTGGGGCC
CTGCTGGTGTGCAGGGAGGGCAGCCTGGCCAAGGAGAAGACCCAG
ACCCTGCACAAGTTCATCCTGCTGTTTGCTGTGTTTGATGAGGGC
AAGAGCTGGCACTCTGAAACCAAGAACAGCCTGATGCAGGACAGG
GATGCTGCCTCTGCCAGGGCCTGGCCCAAGATGCACACTGTGAAT
GGCTATGTGAACAGGAGCCTGCCTGGCCTGATTGGCTGCCACAGG
AAGTCTGTGTACTGGCATGTGATTGGCATGGGCACCACCCCTGAG
GTGCACAGCATCTTCCTGGAGGGCCACACCTTCCTGGTCAGGAAC
CACAGGCAGGCCAGCCTGGAGATCAGCCCCATCACCTTCCTGACT
GCCCAGACCCTGCTGATGGACCTGGGCCAGTTCCTGCTGTTCTGC
CACATCAGCAGCCACCAGCATGATGGCATGGAGGCCTATGTGAAG
GTGGACAGCTGCCCTGAGGAGCCCCAGCTGAGGATGAAGAACAAT
GAGGAGGCTGAGGACTATGATGATGACCTGACTGACTCTGAGATG
GATGTGGTGAGGTTTGATGATGACAACAGCCCCAGCTTCATCCAG
ATCAGGTCTGTGGCCAAGAAGCACCCCAAGACCTGGGTGCACTAC
ATTGCTGCTGAGGAGGAGGACTGGGACTATGCCCCCCTGGTGCTG
GCCCCTGATGACAGGAGCTACAAGAGCCAGTACCTGAACAATGGC
CCCCAGAGGATTGGCAGGAAGTACAAGAAGGTCAGGTTCATGGCC
TACACTGATGAAACCTTCAAGACCAGGGAGGCCATCCAGCATGAG
TCTGGCATCCTGGGCCCCCTGCTGTATGGGGAGGTGGGGGACACC
CTGCTGATCATCTTCAAGAACCAGGCCAGCAGGCCCTACAACATC
TACCCCCACGGCATCACTGATGTGAGGCCCCTGTACAGCAGGAGG
CTGCCCAAGGGGGTGAAGCACCTGAAGGACTTCCCCATCCTGCCT
GGGGAGATCTTCAAGTACAAGTGGACTGTGACTGTGGAGGATGGC
CCCACCAAGTCTGACCCCAGGTGCCTGACCAGATACTACAGCAGC
TTTGTGAACATGGAGAGGGACCTGGCCTCTGGCCTGATTGGCCCC
CTGCTGATCTGCTACAAGGAGTCTGTGGACCAGAGGGGCAACCAG
ATCATGTCTGACAAGAGGAATGTGATCCTGTTCTCTGTGTTTGAT
GAGAACAGGAGCTGGTACCTGACTGAGAACATCCAGAGGTTCCTG
CCCAACCCTGCTGGGGTGCAGCTGGAGGACCCTGAGTTCCAGGCC
AGCAACATCATGCACAGCATCAATGGCTATGTGTTTGACAGCCTG
CAGCTGTCTGTGTGCCTGCATGAGGTGGCCTACTGGTACATCCTG
AGCATTGGGGCCCAGACTGACTTCCTGTCTGTGTTCTTCTCTGGC
TACACCTTCAAGCACAAGATGGTGTATGAGGACACCCTGACCCTG
TTCCCCTTCTCTGGGGAGACTGTGTTCATGAGCATGGAGAACCCT
GGCCTGTGGATTCTGGGCTGCCACAACTCTGACTTCAGGAACAGG
GGCATGACTGCCCTGCTGAAAGTCTCCAGCTGTGACAAGAACACT
GGGGACTACTACGAGGACAGCTATGAGGACATCTCTGCCTACCTG
CTGAGCAAGAACAATGCCATTGAGCCCAGGAGCTTCAGCCAGAAT
AGCAGGCACCCCAGCACCAGGCAGAAGCAGTTCAATGCCACCACC
ATCCCAGAGAATACCACCCTGCAGTCTGACCAGGAGGAGATTGAC
TATGATGACACCATCTCTGTGGAGATGAAGAAGGAGGACTTTGAC
ATCTACGACGAGGACGAGAACCAGAGCCCCAGGAGCTTCCAGAAG
AAGACCAGGCACTACTTCATTGCTGCTGTGGAGAGGCTGTGGGAC
TATGGCATGAGCAGCAGCCCCCATGTGCTGAGGAACAGGGCCCAG
TCTGGCTCTGTGCCCCAGTTCAAGAAGGTGGTGTTCCAGGAGTTC
ACTGATGGCAGCTTCACCCAGCCCCTGTACAGAGGGGAGCTGAAT
GAGCACCTGGGCCTGCTGGGCCCCTACATCAGGGCTGAGGTGGAG
GACAACATCATGGTGACCTTCAGGAACCAGGCCAGCAGGCCCTAC
AGCTTCTACAGCAGCCTGATCAGCTATGAGGAGGACCAGAGGCAG
GGGGCTGAGCCCAGGAAGAACTTTGTGAAGCCCAATGAAACCAAG
ACCTACTTCTGGAAGGTGCAGCACCACATGGCCCCCACCAAGGAT
GAGTTTGACTGCAAGGCCTGGGCCTACTTCTCTGATGTGGACCTG
GAGAAGGATGTGCACTCTGGCCTGATTGGCCCCCTGCTGGTGTGC
CACACCAACACCCTGAACCCTGCCCATGGCAGGCAGGTGACTGTG
CAGGAGTTTGCCCTGTTCTTCACCATCTTTGATGAAACCAAGAGC
TGGTACTTCACTGAGAACATGGAGAGGAACTGCAGGGCCCCCTGC
AACATCCAGATGGAGGACCCCACCTTCAAGGAGAACTACAGGTTC
CATGCCATCAATGGCTACATCATGGACACCCTGCCTGGCCTGGTG
ATGGCCCAGGACCAGAGGATCAGGTGGTACCTGCTGAGCATGGGC
AGCAATGAGAACATCCACAGCATCCACTTCTCTGGCCATGTGTTC
ACTGTGAGGAAGAAGGAGGAGTACAAGATGGCCCTGTACAACCTG
TACCCTGGGGTGTTTGAGACTGTGGAGATGCTGCCCAGCAAGGCT
GGCATCTGGAGGGTGGAGTGCCTGATTGGGGAGCACCTGCATGCT
GGCATGAGCACCCTGTTCCTGGTGTACAGCAACAAGTGCCAGACC
CCCCTGGGCATGGCCTCTGGCCACATCAGGGACTTCCAGATCACT
GCCTCTGGCCAGTATGGCCAGTGGGCCCCCAAGCTGGCCAGGCTG
CACTACTCTGGCAGCATCAATGCCTGGAGCACCAAGGAGCCCTTC
AGCTGGATCAAGGTGGACCTGCTGGCCCCCATGATCATCCATGGC
ATCAAGACCCAGGGGGCCAGGCAGAAGTTCAGCAGCCTGTACATC
AGCCAGTTCATCATCATGTACAGCCTGGATGGCAAGAAGTGGCAG
ACCTACAGGGGCAACAGCACTGGCACCCTGATGGTGTTCTTTGGC
AATGTGGACAGCTCTGGCATCAAGCACAACATCTTCAACCCCCCC
ATCATTGCCAGATACATCAGGCTGCACCCCACCCACTACAGCATC
AGGAGCACCCTGAGGATGGAGCTGATGGGCTGTGACCTGAACAGC
TGCAGCATGCCCCTGGGCATGGAGAGCAAGGCCATCTCTGATGCC
CAGATCACTGCCAGCAGCTACTTCACCAACATGTTTGCCACCTGG
AGCCCCAGCAAGGCCAGGCTGCACCTGCAGGGCAGGAGCAATGCC
TGGAGGCCCCAGGTCAACAACCCCAAGGAGTGGCTGCAGGTGGAC
TTCCAGAAGACCATGAAGGTGACTGGGGTGACCACCCAGGGGGTG
AAGAGCCTGCTGACCAGCATGTATGTGAAGGAGTTCCTGATCAGC
AGCAGCCAGGATGGCCACCAGTGGACCCTGTTCTTCCAGAATGGC
AAGGTGAAGGTGTTCCAGGGCAACCAGGACAGCTTCACCCCTGTG
GTGAACAGCCTGGACCCCCCCCTGCTGACCAGATACCTGAGGATT
CACCCCCAGAGCTGGGTGCACCAGATTGCCCTGAGGATGGAGGTG
CTGGGCTGTGAGGCCCAGGACCTGTACTGATTAATTAAGAGCATC
TTACCGCCATTTATTCCCATATTTGTTCTGTTTTTCTTGATTTGG
GTATACATTTAAATGTTAATAAAACAAAATGGTGGGGCAATCATT
TACATTTTTAGGGATATGTAATTACTAGTTCAGGTGTATTGCCAC
AAGACAAACATGTTAAGAAACTTTCCCGTTATTTACGCTCTGTTC
CTGTTAATCAACCTCTGGATTACAAAATTTGTGAAAGATTGACTG
ATATTCTTAACTATGTTGCTCCTTTTACGCTGTGTGGATATGCTG
CTTTATAGCCTCTGTATCTAGCTATTGCTTCCCGTACGGCTTTCG
TTTTCTCCTCCTTGTATAAATCCTGGTTGCTGTCTCTTTTAGAGG
AGTTGTGGCCCGTTGTCCGTCAACGTGGCGTGGTGTGCTCTGTGT
TTGCTGACGCAACCCCCACTGGCTGGGGCATTGCCACCACCTGTC
AACTCCTTTCTGGGACTTTCGCTTTCCCCCTCCCGATCGCCACGG
CAGAACTCATCGCCGCCTGCCTTGCCCGCTGCTGGACAGGGGCTA
GGTTGCTGGGCACTGATAATTCCGTGGTGTTGTCTGTGCCTTCTA
GTTGCCAGCCATCTGTTGTTTGCCCCTCCCCCGTGCCTTCCTTGA
CCCTGGAAGGTGCCACTCCCACTGTCCTTTCCTAATAAAATGAGG
AAATTGCATCGCATTGTCTGAGTAGGTGTCATTCTATTCTGGGGG
GTGGGGTGGGGCAGGACAGCAAGGGGGAGGATTGGGAAGACAATA
GCAGGCATGCTGGGGATGCGGTGGGCTCTATGGCTCTAGAGCATG
GCTACGTAGATAAGTAGCATGGCGGGTTAATCATTAACTACACCT
GCAGGAGGAACCCCTAGTGATGGAGTTGGCCACTCCCTCTCTGCG
CGCTCGCTCGCTCA
(3) ceDNA construct 61 contains
3x_SerpEnh_11-mer_spacers_v3
(SEQ ID NO: 644)
TGAGCGAGCGAGCGCGCAGAGAGGGAGTGGCCAACTCCATCACTA
GGGGTTCCTTGTAGTTAATGATTAACCCGCCATGCTACTTATCGC
GGCCGCGGGGGAGGCTGCTGGTGAATATTAACCAAGGTCACCCCA
GTTATCGGAGGAGCAAACAGGGGCTAAGTCCACTGCAAAGTCCTG
GGGGAGGCTGCTGGTGAATATTAACCAAGGTCACCCCAGTTATCG
GAGGAGCAAACAGGGGCTAAGTCCACAGTGTTTACAAGGGGGAGG
CTGCTGGTGAATATTAACCAAGGTCACCCCAGTTATCGGAGGAGC
AAACAGGGGCTAAGTCCACGGTACCCACTGGGAGGATGTTGAGTA
AGATGGAAAACTACTGATGACCCTTGCAGAGACAGAGTATTAGGA
CATGTTTGAACAGGGGCCGGGCGATCAGCAGGTAGCTCTAGAGGA
TCCCCGTCTGTCTGCACATTTCGTAGAGCGAGTGTTCCGATACTC
TAATCTCCCTAGGCAAGGTTCATATTTGTGTAGGTTACTTATTCT
CCTTTTGTTGACTAAGTCAATAATCAGAATCAGCAGGTTTGGAGT
CAGCTTGGCAGGGATCAGCAGCCTGGGTTGGAAGGAGGGGGTATA
AAAGCCCCTTCACCAGGAGAAGCCGTCACACAGATCCACAAGCTC
CTGAAGAGGTAAGGGTTTAAGGGATGGTTGGTTGGTGGGGTATTA
ATGTTTAATTACCTGGAGCACCTGCCTGAAATCACTTTTTTTCAG
GTTGGTTTAAACGCCGCCACCATGCAGATAGAGCTCAGCACCTGC
TTCTTCCTGTGCCTCCTCAGGTTCTGCTTCTCTGCCACCAGGAGA
TACTACCTGGGGGCTGTGGAGCTGAGCTGGGACTACATGCAGTCT
GACCTGGGGGAGCTGCCTGTGGACGCCAGGTTCCCCCCCAGAGTG
CCCAAGAGCTTCCCCTTCAACACCTCTGTGGTGTACAAGAAGACC
CTGTTTGTGGAGTTCACTGACCACCTGTTCAACATTGCCAAGCCC
AGGCCCCCCTGGATGGGCCTGCTGGGCCCCACCATCCAGGCTGAG
GTGTATGACACTGTGGTGATCACCCTGAAGAACATGGCCAGCCAC
CCTGTGAGCCTGCATGCTGTGGGGGTGAGCTACTGGAAGGCCTCT
GAGGGGGCTGAGTATGATGACCAGACCAGCCAGAGGGAGAAGGAG
GATGACAAGGTGTTCCCTGGGGGCAGCCACACCTATGTGTGGCAG
GTGCTGAAGGAGAATGGCCCCATGGCCTCTGACCCCCTGTGCCTG
ACCTACAGCTACCTGAGCCATGTGGACCTGGTGAAGGACCTGAAC
TCTGGCCTGATTGGGGCCCTGCTGGTGTGCAGGGAGGGCAGCCTG
GCCAAGGAGAAGACCCAGACCCTGCACAAGTTCATCCTGCTGTTT
GCTGTGTTTGATGAGGGCAAGAGCTGGCACTCTGAAACCAAGAAC
AGCCTGATGCAGGACAGGGATGCTGCCTCTGCCAGGGCCTGGCCC
AAGATGCACACTGTGAATGGCTATGTGAACAGGAGCCTGCCTGGC
CTGATTGGCTGCCACAGGAAGTCTGTGTACTGGCATGTGATTGGC
ATGGGCACCACCCCTGAGGTGCACAGCATCTTCCTGGAGGGCCAC
ACCTTCCTGGTCAGGAACCACAGGCAGGCCAGCCTGGAGATCAGC
CCCATCACCTTCCTGACTGCCCAGACCCTGCTGATGGACCTGGGC
CAGTTCCTGCTGTTCTGCCACATCAGCAGCCACCAGCATGATGGC
ATGGAGGCCTATGTGAAGGTGGACAGCTGCCCTGAGGAGCCCCAG
CTGAGGATGAAGAACAATGAGGAGGCTGAGGACTATGATGATGAC
CTGACTGACTCTGAGATGGATGTGGTGAGGTTTGATGATGACAAC
AGCCCCAGCTTCATCCAGATCAGGTCTGTGGCCAAGAAGCACCCC
AAGACCTGGGTGCACTACATTGCTGCTGAGGAGGAGGACTGGGAC
TATGCCCCCCTGGTGCTGGCCCCTGATGACAGGAGCTACAAGAGC
CAGTACCTGAACAATGGCCCCCAGAGGATTGGCAGGAAGTACAAG
AAGGTCAGGTTCATGGCCTACACTGATGAAACCTTCAAGACCAGG
GAGGCCATCCAGCATGAGTCTGGCATCCTGGGCCCCCTGCTGTAT
GGGGAGGTGGGGGACACCCTGCTGATCATCTTCAAGAACCAGGCC
AGCAGGCCCTACAACATCTACCCCCACGGCATCACTGATGTGAGG
CCCCTGTACAGCAGGAGGCTGCCCAAGGGGGTGAAGCACCTGAAG
GACTTCCCCATCCTGCCTGGGGAGATCTTCAAGTACAAGTGGACT
GTGACTGTGGAGGATGGCCCCACCAAGTCTGACCCCAGGTGCCTG
ACCAGATACTACAGCAGCTTTGTGAACATGGAGAGGGACCTGGCC
TCTGGCCTGATTGGCCCCCTGCTGATCTGCTACAAGGAGTCTGTG
GACCAGAGGGGCAACCAGATCATGTCTGACAAGAGGAATGTGATC
CTGTTCTCTGTGTTTGATGAGAACAGGAGCTGGTACCTGACTGAG
AACATCCAGAGGTTCCTGCCCAACCCTGCTGGGGTGCAGCTGGAG
GACCCTGAGTTCCAGGCCAGCAACATCATGCACAGCATCAATGGC
TATGTGTTTGACAGCCTGCAGCTGTCTGTGTGCCTGCATGAGGTG
GCCTACTGGTACATCCTGAGCATTGGGGCCCAGACTGACTTCCTG
TCTGTGTTCTTCTCTGGCTACACCTTCAAGCACAAGATGGTGTAT
GAGGACACCCTGACCCTGTTCCCCTTCTCTGGGGAGACTGTGTTC
ATGAGCATGGAGAACCCTGGCCTGTGGATTCTGGGCTGCCACAAC
TCTGACTTCAGGAACAGGGGCATGACTGCCCTGCTGAAAGTCTCC
AGCTGTGACAAGAACACTGGGGACTACTACGAGGACAGCTATGAG
GACATCTCTGCCTACCTGCTGAGCAAGAACAATGCCATTGAGCCC
AGGAGCTTCAGCCAGAATAGCAGGCACCCCAGCACCAGGCAGAAG
CAGTTCAATGCCACCACCATCCCAGAGAATACCACCCTGCAGTCT
GACCAGGAGGAGATTGACTATGATGACACCATCTCTGTGGAGATG
AAGAAGGAGGACTTTGACATCTACGACGAGGACGAGAACCAGAGC
CCCAGGAGCTTCCAGAAGAAGACCAGGCACTACTTCATTGCTGCT
GTGGAGAGGCTGTGGGACTATGGCATGAGCAGCAGCCCCCATGTG
CTGAGGAACAGGGCCCAGTCTGGCTCTGTGCCCCAGTTCAAGAAG
GTGGTGTTCCAGGAGTTCACTGATGGCAGCTTCACCCAGCCCCTG
TACAGAGGGGAGCTGAATGAGCACCTGGGCCTGCTGGGCCCCTAC
ATCAGGGCTGAGGTGGAGGACAACATCATGGTGACCTTCAGGAAC
CAGGCCAGCAGGCCCTACAGCTTCTACAGCAGCCTGATCAGCTAT
GAGGAGGACCAGAGGCAGGGGGCTGAGCCCAGGAAGAACTTTGTG
AAGCCCAATGAAACCAAGACCTACTTCTGGAAGGTGCAGCACCAC
ATGGCCCCCACCAAGGATGAGTTTGACTGCAAGGCCTGGGCCTAC
TTCTCTGATGTGGACCTGGAGAAGGATGTGCACTCTGGCCTGATT
GGCCCCCTGCTGGTGTGCCACACCAACACCCTGAACCCTGCCCAT
GGCAGGCAGGTGACTGTGCAGGAGTTTGCCCTGTTCTTCACCATC
TTTGATGAAACCAAGAGCTGGTACTTCACTGAGAACATGGAGAGG
AACTGCAGGGCCCCCTGCAACATCCAGATGGAGGACCCCACCTTC
AAGGAGAACTACAGGTTCCATGCCATCAATGGCTACATCATGGAC
ACCCTGCCTGGCCTGGTGATGGCCCAGGACCAGAGGATCAGGTGG
TACCTGCTGAGCATGGGCAGCAATGAGAACATCCACAGCATCCAC
TTCTCTGGCCATGTGTTCACTGTGAGGAAGAAGGAGGAGTACAAG
ATGGCCCTGTACAACCTGTACCCTGGGGTGTTTGAGACTGTGGAG
ATGCTGCCCAGCAAGGCTGGCATCTGGAGGGTGGAGTGCCTGATT
GGGGAGCACCTGCATGCTGGCATGAGCACCCTGTTCCTGGTGTAC
AGCAACAAGTGCCAGACCCCCCTGGGCATGGCCTCTGGCCACATC
AGGGACTTCCAGATCACTGCCTCTGGCCAGTATGGCCAGTGGGCC
CCCAAGCTGGCCAGGCTGCACTACTCTGGCAGCATCAATGCCTGG
AGCACCAAGGAGCCCTTCAGCTGGATCAAGGTGGACCTGCTGGCC
CCCATGATCATCCATGGCATCAAGACCCAGGGGGCCAGGCAGAAG
TTCAGCAGCCTGTACATCAGCCAGTTCATCATCATGTACAGCCTG
GATGGCAAGAAGTGGCAGACCTACAGGGGCAACAGCACTGGCACC
CTGATGGTGTTCTTTGGCAATGTGGACAGCTCTGGCATCAAGCAC
AACATCTTCAACCCCCCCATCATTGCCAGATACATCAGGCTGCAC
CCCACCCACTACAGCATCAGGAGCACCCTGAGGATGGAGCTGATG
GGCTGTGACCTGAACAGCTGCAGCATGCCCCTGGGCATGGAGAGC
AAGGCCATCTCTGATGCCCAGATCACTGCCAGCAGCTACTTCACC
AACATGTTTGCCACCTGGAGCCCCAGCAAGGCCAGGCTGCACCTG
CAGGGCAGGAGCAATGCCTGGAGGCCCCAGGTCAACAACCCCAAG
GAGTGGCTGCAGGTGGACTTCCAGAAGACCATGAAGGTGACTGGG
GTGACCACCCAGGGGGTGAAGAGCCTGCTGACCAGCATGTATGTG
AAGGAGTTCCTGATCAGCAGCAGCCAGGATGGCCACCAGTGGACC
CTGTTCTTCCAGAATGGCAAGGTGAAGGTGTTCCAGGGCAACCAG
GACAGCTTCACCCCTGTGGTGAACAGCCTGGACCCCCCCCTGCTG
ACCAGATACCTGAGGATTCACCCCCAGAGCTGGGTGCACCAGATT
GCCCTGAGGATGGAGGTGCTGGGCTGTGAGGCCCAGGACCTGTAC
TGATTAATTAAGAGCATCTTACCGCCATTTATTCCCATATTTGTT
CTGTTTTTCTTGATTTGGGTATACATTTAAATGTTAATAAAACAA
AATGGTGGGGCAATCATTTACATTTTTAGGGATATGTAATTACTA
GTTCAGGTGTATTGCCACAAGACAAACATGTTAAGAAACTTTCCC
GTTATTTACGCTCTGTTCCTGTTAATCAACCTCTGGATTACAAAA
TTTGTGAAAGATTGACTGATATTCTTAACTATGTTGCTCCTTTTA
CGCTGTGTGGATATGCTGCTTTATAGCCTCTGTATCTAGCTATTG
CTTCCCGTACGGCTTTCGTTTTCTCCTCCTTGTATAAATCCTGGT
TGCTGTCTCTTTTAGAGGAGTTGTGGCCCGTTGTCCGTCAACGTG
GCGTGGTGTGCTCTGTGTTTGCTGACGCAACCCCCACTGGCTGGG
GCATTGCCACCACCTGTCAACTCCTTTCTGGGACTTTCGCTTTCC
CCCTCCCGATCGCCACGGCAGAACTCATCGCCGCCTGCCTTGCCC
GCTGCTGGACAGGGGCTAGGTTGCTGGGCACTGATAATTCCGTGG
TGTTGTCTGTGCCTTCTAGTTGCCAGCCATCTGTTGTTTGCCCCT
CCCCCGTGCCTTCCTTGACCCTGGAAGGTGCCACTCCCACTGTCC
TTTCCTAATAAAATGAGGAAATTGCATCGCATTGTCTGAGTAGGT
GTCATTCTATTCTGGGGGGTGGGGTGGGGCAGGACAGCAAGGGGG
AGGATTGGGAAGACAATAGCAGGCATGCTGGGGATGCGGTGGGCT
CTATGGCTCTAGAGCATGGCTACGTAGATAAGTAGCATGGCGGGT
TAATCATTAACTACACCTGCAGGAGGAACCCCTAGTGATGGAGTT
GGCCACTCCCTCTCTGCGCGCTCGCTCGCTCA
(4) ceDNA construct 62 contains 3x_Bushbaby
SerpEnh with adenine (A) spacers
(“3xBushbaby_Aspacers”).
(SEQ ID NO: 645)
TGAGCGAGCGAGCGCGCAGAGAGGGAGTGGCCAACTCCATCACTA
GGGGTTCCTTGTAGTTAATGATTAACCCGCCATGCTACTTATCGC
GGCCGCAGGGGAAGCTACTGGTGAATATTAACCAAGGTCACCCAG
TTATCAGGGAGCAAACAGGAGCTAAGTCCATAGGGGGAAGCTACT
GGTGAATATTAACCAAGGTCACCCAGTTATCAGGGAGCAAACAGG
AGCTAAGTCCATAGGGGGAAGCTACTGGTGAATATTAACCAAGGT
CACCCAGTTATCAGGGAGCAAACAGGAGCTAAGTCCATGGTACCC
ACTGGGAGGATGTTGAGTAAGATGGAAAACTACTGATGACCCTTG
CAGAGACAGAGTATTAGGACATGTTTGAACAGGGGCCGGGCGATC
AGCAGGTAGCTCTAGAGGATCCCCGTCTGTCTGCACATTTCGTAG
AGCGAGTGTTCCGATACTCTAATCTCCCTAGGCAAGGTTCATATT
TGTGTAGGTTACTTATTCTCCTTTTGTTGACTAAGTCAATAATCA
GAATCAGCAGGTTTGGAGTCAGCTTGGCAGGGATCAGCAGCCTGG
GTTGGAAGGAGGGGGTATAAAAGCCCCTTCACCAGGAGAAGCCGT
CACACAGATCCACAAGCTCCTGAAGAGGTAAGGGTTTAAGGGATG
GTTGGTTGGTGGGGTATTAATGTTTAATTACCTGGAGCACCTGCC
TGAAATCACTTTTTTTCAGGTTGGTTTAAACGCCGCCACCATGCA
GATAGAGCTCAGCACCTGCTTCTTCCTGTGCCTCCTCAGGTTCTG
CTTCTCTGCCACCAGGAGATACTACCTGGGGGCTGTGGAGCTGAG
CTGGGACTACATGCAGTCTGACCTGGGGGAGCTGCCTGTGGACGC
CAGGTTCCCCCCCAGAGTGCCCAAGAGCTTCCCCTTCAACACCTC
TGTGGTGTACAAGAAGACCCTGTTTGTGGAGTTCACTGACCACCT
GTTCAACATTGCCAAGCCCAGGCCCCCCTGGATGGGCCTGCTGGG
CCCCACCATCCAGGCTGAGGTGTATGACACTGTGGTGATCACCCT
GAAGAACATGGCCAGCCACCCTGTGAGCCTGCATGCTGTGGGGGT
GAGCTACTGGAAGGCCTCTGAGGGGGCTGAGTATGATGACCAGAC
CAGCCAGAGGGAGAAGGAGGATGACAAGGTGTTCCCTGGGGGCAG
CCACACCTATGTGTGGCAGGTGCTGAAGGAGAATGGCCCCATGGC
CTCTGACCCCCTGTGCCTGACCTACAGCTACCTGAGCCATGTGGA
CCTGGTGAAGGACCTGAACTCTGGCCTGATTGGGGCCCTGCTGGT
GTGCAGGGAGGGCAGCCTGGCCAAGGAGAAGACCCAGACCCTGCA
CAAGTTCATCCTGCTGTTTGCTGTGTTTGATGAGGGCAAGAGCTG
GCACTCTGAAACCAAGAACAGCCTGATGCAGGACAGGGATGCTGC
CTCTGCCAGGGCCTGGCCCAAGATGCACACTGTGAATGGCTATGT
GAACAGGAGCCTGCCTGGCCTGATTGGCTGCCACAGGAAGTCTGT
GTACTGGCATGTGATTGGCATGGGCACCACCCCTGAGGTGCACAG
CATCTTCCTGGAGGGCCACACCTTCCTGGTCAGGAACCACAGGCA
GGCCAGCCTGGAGATCAGCCCCATCACCTTCCTGACTGCCCAGAC
CCTGCTGATGGACCTGGGCCAGTTCCTGCTGTTCTGCCACATCAG
CAGCCACCAGCATGATGGCATGGAGGCCTATGTGAAGGTGGACAG
CTGCCCTGAGGAGCCCCAGCTGAGGATGAAGAACAATGAGGAGGC
TGAGGACTATGATGATGACCTGACTGACTCTGAGATGGATGTGGT
GAGGTTTGATGATGACAACAGCCCCAGCTTCATCCAGATCAGGTC
TGTGGCCAAGAAGCACCCCAAGACCTGGGTGCACTACATTGCTGC
TGAGGAGGAGGACTGGGACTATGCCCCCCTGGTGCTGGCCCCTGA
TGACAGGAGCTACAAGAGCCAGTACCTGAACAATGGCCCCCAGAG
GATTGGCAGGAAGTACAAGAAGGTCAGGTTCATGGCCTACACTGA
TGAAACCTTCAAGACCAGGGAGGCCATCCAGCATGAGTCTGGCAT
CCTGGGCCCCCTGCTGTATGGGGAGGTGGGGGACACCCTGCTGAT
CATCTTCAAGAACCAGGCCAGCAGGCCCTACAACATCTACCCCCA
CGGCATCACTGATGTGAGGCCCCTGTACAGCAGGAGGCTGCCCAA
GGGGGTGAAGCACCTGAAGGACTTCCCCATCCTGCCTGGGGAGAT
CTTCAAGTACAAGTGGACTGTGACTGTGGAGGATGGCCCCACCAA
GTCTGACCCCAGGTGCCTGACCAGATACTACAGCAGCTTTGTGAA
CATGGAGAGGGACCTGGCCTCTGGCCTGATTGGCCCCCTGCTGAT
CTGCTACAAGGAGTCTGTGGACCAGAGGGGCAACCAGATCATGTC
TGACAAGAGGAATGTGATCCTGTTCTCTGTGTTTGATGAGAACAG
GAGCTGGTACCTGACTGAGAACATCCAGAGGTTCCTGCCCAACCC
TGCTGGGGTGCAGCTGGAGGACCCTGAGTTCCAGGCCAGCAACAT
CATGCACAGCATCAATGGCTATGTGTTTGACAGCCTGCAGCTGTC
TGTGTGCCTGCATGAGGTGGCCTACTGGTACATCCTGAGCATTGG
GGCCCAGACTGACTTCCTGTCTGTGTTCTTCTCTGGCTACACCTT
CAAGCACAAGATGGTGTATGAGGACACCCTGACCCTGTTCCCCTT
CTCTGGGGAGACTGTGTTCATGAGCATGGAGAACCCTGGCCTGTG
GATTCTGGGCTGCCACAACTCTGACTTCAGGAACAGGGGCATGAC
TGCCCTGCTGAAAGTCTCCAGCTGTGACAAGAACACTGGGGACTA
CTACGAGGACAGCTATGAGGACATCTCTGCCTACCTGCTGAGCAA
GAACAATGCCATTGAGCCCAGGAGCTTCAGCCAGAATAGCAGGCA
CCCCAGCACCAGGCAGAAGCAGTTCAATGCCACCACCATCCCAGA
GAATACCACCCTGCAGTCTGACCAGGAGGAGATTGACTATGATGA
CACCATCTCTGTGGAGATGAAGAAGGAGGACTTTGACATCTACGA
CGAGGACGAGAACCAGAGCCCCAGGAGCTTCCAGAAGAAGACCAG
GCACTACTTCATTGCTGCTGTGGAGAGGCTGTGGGACTATGGCAT
GAGCAGCAGCCCCCATGTGCTGAGGAACAGGGCCCAGTCTGGCTC
TGTGCCCCAGTTCAAGAAGGTGGTGTTCCAGGAGTTCACTGATGG
CAGCTTCACCCAGCCCCTGTACAGAGGGGAGCTGAATGAGCACCT
GGGCCTGCTGGGCCCCTACATCAGGGCTGAGGTGGAGGACAACAT
CATGGTGACCTTCAGGAACCAGGCCAGCAGGCCCTACAGCTTCTA
CAGCAGCCTGATCAGCTATGAGGAGGACCAGAGGCAGGGGGCTGA
GCCCAGGAAGAACTTTGTGAAGCCCAATGAAACCAAGACCTACTT
CTGGAAGGTGCAGCACCACATGGCCCCCACCAAGGATGAGTTTGA
CTGCAAGGCCTGGGCCTACTTCTCTGATGTGGACCTGGAGAAGGA
TGTGCACTCTGGCCTGATTGGCCCCCTGCTGGTGTGCCACACCAA
CACCCTGAACCCTGCCCATGGCAGGCAGGTGACTGTGCAGGAGTT
TGCCCTGTTCTTCACCATCTTTGATGAAACCAAGAGCTGGTACTT
CACTGAGAACATGGAGAGGAACTGCAGGGCCCCCTGCAACATCCA
GATGGAGGACCCCACCTTCAAGGAGAACTACAGGTTCCATGCCAT
CAATGGCTACATCATGGACACCCTGCCTGGCCTGGTGATGGCCCA
GGACCAGAGGATCAGGTGGTACCTGCTGAGCATGGGCAGCAATGA
GAACATCCACAGCATCCACTTCTCTGGCCATGTGTTCACTGTGAG
GAAGAAGGAGGAGTACAAGATGGCCCTGTACAACCTGTACCCTGG
GGTGTTTGAGACTGTGGAGATGCTGCCCAGCAAGGCTGGCATCTG
GAGGGTGGAGTGCCTGATTGGGGAGCACCTGCATGCTGGCATGAG
CACCCTGTTCCTGGTGTACAGCAACAAGTGCCAGACCCCCCTGGG
CATGGCCTCTGGCCACATCAGGGACTTCCAGATCACTGCCTCTGG
CCAGTATGGCCAGTGGGCCCCCAAGCTGGCCAGGCTGCACTACTC
TGGCAGCATCAATGCCTGGAGCACCAAGGAGCCCTTCAGCTGGAT
CAAGGTGGACCTGCTGGCCCCCATGATCATCCATGGCATCAAGAC
CCAGGGGGCCAGGCAGAAGTTCAGCAGCCTGTACATCAGCCAGTT
CATCATCATGTACAGCCTGGATGGCAAGAAGTGGCAGACCTACAG
GGGCAACAGCACTGGCACCCTGATGGTGTTCTTTGGCAATGTGGA
CAGCTCTGGCATCAAGCACAACATCTTCAACCCCCCCATCATTGC
CAGATACATCAGGCTGCACCCCACCCACTACAGCATCAGGAGCAC
CCTGAGGATGGAGCTGATGGGCTGTGACCTGAACAGCTGCAGCAT
GCCCCTGGGCATGGAGAGCAAGGCCATCTCTGATGCCCAGATCAC
TGCCAGCAGCTACTTCACCAACATGTTTGCCACCTGGAGCCCCAG
CAAGGCCAGGCTGCACCTGCAGGGCAGGAGCAATGCCTGGAGGCC
CCAGGTCAACAACCCCAAGGAGTGGCTGCAGGTGGACTTCCAGAA
GACCATGAAGGTGACTGGGGTGACCACCCAGGGGGTGAAGAGCCT
GCTGACCAGCATGTATGTGAAGGAGTTCCTGATCAGCAGCAGCCA
GGATGGCCACCAGTGGACCCTGTTCTTCCAGAATGGCAAGGTGAA
GGTGTTCCAGGGCAACCAGGACAGCTTCACCCCTGTGGTGAACAG
CCTGGACCCCCCCCTGCTGACCAGATACCTGAGGATTCACCCCCA
GAGCTGGGTGCACCAGATTGCCCTGAGGATGGAGGTGCTGGGCTG
TGAGGCCCAGGACCTGTACTGATTAATTAAGAGCATCTTACCGCC
ATTTATTCCCATATTTGTTCTGTTTTTCTTGATTTGGGTATACAT
TTAAATGTTAATAAAACAAAATGGTGGGGCAATCATTTACATTTT
TAGGGATATGTAATTACTAGTTCAGGTGTATTGCCACAAGACAAA
CATGTTAAGAAACTTTCCCGTTATTTACGCTCTGTTCCTGTTAAT
CAACCTCTGGATTACAAAATTTGTGAAAGATTGACTGATATTCTT
AACTATGTTGCTCCTTTTACGCTGTGTGGATATGCTGCTTTATAG
CCTCTGTATCTAGCTATTGCTTCCCGTACGGCTTTCGTTTTCTCC
TCCTTGTATAAATCCTGGTTGCTGTCTCTTTTAGAGGAGTTGTGG
CCCGTTGTCCGTCAACGTGGCGTGGTGTGCTCTGTGTTTGCTGAC
GCAACCCCCACTGGCTGGGGCATTGCCACCACCTGTCAACTCCTT
TCTGGGACTTTCGCTTTCCCCCTCCCGATCGCCACGGCAGAACTC
ATCGCCGCCTGCCTTGCCCGCTGCTGGACAGGGGCTAGGTTGCTG
GGCACTGATAATTCCGTGGTGTTGTCTGTGCCTTCTAGTTGCCAG
CCATCTGTTGTTTGCCCCTCCCCCGTGCCTTCCTTGACCCTGGAA
GGTGCCACTCCCACTGTCCTTTCCTAATAAAATGAGGAAATTGCA
TCGCATTGTCTGAGTAGGTGTCATTCTATTCTGGGGGGTGGGGTG
GGGCAGGACAGCAAGGGGGAGGATTGGGAAGACAATAGCAGGCAT
GCTGGGGATGCGGTGGGCTCTATGGCTCTAGAGCATGGCTACGTA
GATAAGTAGCATGGCGGGTTAATCATTAACTACACCTGCAGGAGG
AACCCCTAGTGATGGAGTTGGCCACTCCCTCTCTGCGCGCTCGCT
CGCTCACTCA
(5) ceDNA construct 39 which has the essentially
identical sequence to ceDNA construct 10 except
that it contains a truncated right ITR.
(SEQ ID NO: 646)
TGAGCGAGCGAGCGCGCAGAGAGGGAGTGGCCAACTCCATCACTA
GGGGTTCCTTGTAGTTAATGATTAACCCACCATGCTACTTATGGC
CTGCAGGGGGGGAGGCTGCTGGTGAATATTAACCAAGGTCACCCC
AGTTATCGGAGGAGCAAACAGGGGCTAAGTCCACCGGGGGAGGCT
GCTGGTGAATATTAACCAAGGTCACCCCAGTTATCGGAGGAGCAA
ACAGGGGCTAAGTCCACCGGGGGAGGCTGCTGGTGAATATTAACC
AAGGTCACCCCAGTTATCGGAGGAGCAAACAGGGGCTAAGTCCAC
GGTACCCACTGGGAGGATGTTGAGTAAGATGGAAAACTACTGATG
ACCCTTGCAGAGACAGAGTATTAGGACATGTTTGAACAGGGGCCG
GGCGATCAGCAGGTAGCTCTAGAGGATCCCCGTCTGTCTGCACAT
TTCGTAGAGCGAGTGTTCCGATACTCTAATCTCCCTAGGCAAGGT
TCATATTTGTGTAGGTTACTTATTCTCCTTTTGTTGACTAAGTCA
ATAATCAGAATCAGCAGGTTTGGAGTCAGCTTGGCAGGGATCAGC
AGCCTGGGTTGGAAGGAGGGGGTATAAAAGCCCCTTCACCAGGAG
AAGCCGTCACACAGATCCACAAGCTCCTGAAGAGGTAAGGGTTTA
AGGGATGGTTGGTTGGTGGGGTATTAATGTTTAATTACCTGGAGC
ACCTGCCTGAAATCACTTTTTTTCAGGTTGGTTTAAACGCCGCCA
CCATGCAGATTGAGCTGAGCACCTGCTTCTTCCTGTGCCTGCTGA
GGTTCTGCTTCTCTGCCACCAGGAGATACTACCTGGGGGCTGTGG
AGCTGAGCTGGGACTACATGCAGTCTGACCTGGGGGAGCTGCCTG
TGGATGCCAGGTTCCCCCCCAGAGTGCCCAAGAGCTTCCCCTTCA
ACACCTCTGTGGTGTACAAGAAGACCCTGTTTGTGGAGTTCACTG
ACCACCTGTTCAACATTGCCAAGCCCAGGCCCCCCTGGATGGGCC
TGCTGGGCCCCACCATCCAGGCTGAGGTGTATGACACTGTGGTGA
TCACCCTGAAGAACATGGCCAGCCACCCTGTGAGCCTGCATGCTG
TGGGGGTGAGCTACTGGAAGGCCTCTGAGGGGGCTGAGTATGATG
ACCAGACCAGCCAGAGGGAGAAGGAGGATGACAAGGTGTTCCCTG
GGGGCAGCCACACCTATGTGTGGCAGGTGCTGAAGGAGAATGGCC
CCATGGCCTCTGACCCCCTGTGCCTGACCTACAGCTACCTGAGCC
ATGTGGACCTGGTGAAGGACCTGAACTCTGGCCTGATTGGGGCCC
TGCTGGTGTGCAGGGAGGGCAGCCTGGCCAAGGAGAAGACCCAGA
CCCTGCACAAGTTCATCCTGCTGTTTGCTGTGTTTGATGAGGGCA
AGAGCTGGCACTCTGAAACCAAGAACAGCCTGATGCAGGACAGGG
ATGCTGCCTCTGCCAGGGCCTGGCCCAAGATGCACACTGTGAATG
GCTATGTGAACAGGAGCCTGCCTGGCCTGATTGGCTGCCACAGGA
AGTCTGTGTACTGGCATGTGATTGGCATGGGCACCACCCCTGAGG
TGCACAGCATCTTCCTGGAGGGCCACACCTTCCTGGTCAGGAACC
ACAGGCAGGCCAGCCTGGAGATCAGCCCCATCACCTTCCTGACTG
CCCAGACCCTGCTGATGGACCTGGGCCAGTTCCTGCTGTTCTGCC
ACATCAGCAGCCACCAGCATGATGGCATGGAGGCCTATGTGAAGG
TGGACAGCTGCCCTGAGGAGCCCCAGCTGAGGATGAAGAACAATG
AGGAGGCTGAGGACTATGATGATGACCTGACTGACTCTGAGATGG
ATGTGGTGAGGTTTGATGATGACAACAGCCCCAGCTTCATCCAGA
TCAGGTCTGTGGCCAAGAAGCACCCCAAGACCTGGGTGCACTACA
TTGCTGCTGAGGAGGAGGACTGGGACTATGCCCCCCTGGTGCTGG
CCCCTGATGACAGGAGCTACAAGAGCCAGTACCTGAACAATGGCC
CCCAGAGGATTGGCAGGAAGTACAAGAAGGTCAGGTTCATGGCCT
ACACTGATGAAACCTTCAAGACCAGGGAGGCCATCCAGCATGAGT
CTGGCATCCTGGGCCCCCTGCTGTATGGGGAGGTGGGGGACACCC
TGCTGATCATCTTCAAGAACCAGGCCAGCAGGCCCTACAACATCT
ACCCCCATGGCATCACTGATGTGAGGCCCCTGTACAGCAGGAGGC
TGCCCAAGGGGGTGAAGCACCTGAAGGACTTCCCCATCCTGCCTG
GGGAGATCTTCAAGTACAAGTGGACTGTGACTGTGGAGGATGGCC
CCACCAAGTCTGACCCCAGGTGCCTGACCAGATACTACAGCAGCT
TTGTGAACATGGAGAGGGACCTGGCCTCTGGCCTGATTGGCCCCC
TGCTGATCTGCTACAAGGAGTCTGTGGACCAGAGGGGCAACCAGA
TCATGTCTGACAAGAGGAATGTGATCCTGTTCTCTGTGTTTGATG
AGAACAGGAGCTGGTACCTGACTGAGAACATCCAGAGGTTCCTGC
CCAACCCTGCTGGGGTGCAGCTGGAGGACCCTGAGTTCCAGGCCA
GCAACATCATGCACAGCATCAATGGCTATGTGTTTGACAGCCTGC
AGCTGTCTGTGTGCCTGCATGAGGTGGCCTACTGGTACATCCTGA
GCATTGGGGCCCAGACTGACTTCCTGTCTGTGTTCTTCTCTGGCT
ACACCTTCAAGCACAAGATGGTGTATGAGGACACCCTGACCCTGT
TCCCCTTCTCTGGGGAGACTGTGTTCATGAGCATGGAGAACCCTG
GCCTGTGGATTCTGGGCTGCCACAACTCTGACTTCAGGAACAGGG
GCATGACTGCCCTGCTGAAAGTCTCCAGCTGTGACAAGAACACTG
GGGACTACTATGAGGACAGCTATGAGGACATCTCTGCCTACCTGC
TGAGCAAGAACAATGCCATTGAGCCCAGGAGCTTCAGCCAGAATA
GCAGGCACCCCAGCACCAGGCAGAAGCAGTTCAATGCCACCACCA
TCCCAGAGAATACCACCCTGCAGTCTGACCAGGAGGAGATTGACT
ATGATGACACCATCTCTGTGGAGATGAAGAAGGAGGACTTTGACA
TCTACGACGAGGACGAGAACCAGAGCCCCAGGAGCTTCCAGAAGA
AGACCAGGCACTACTTCATTGCTGCTGTGGAGAGGCTGTGGGACT
ATGGCATGAGCAGCAGCCCCCATGTGCTGAGGAACAGGGCCCAGT
CTGGCTCTGTGCCCCAGTTCAAGAAGGTGGTGTTCCAGGAGTTCA
CTGATGGCAGCTTCACCCAGCCCCTGTACAGAGGGGAGCTGAATG
AGCACCTGGGCCTGCTGGGCCCCTACATCAGGGCTGAGGTGGAGG
ACAACATCATGGTGACCTTCAGGAACCAGGCCAGCAGGCCCTACA
GCTTCTACAGCAGCCTGATCAGCTATGAGGAGGACCAGAGGCAGG
GGGCTGAGCCCAGGAAGAACTTTGTGAAGCCCAATGAAACCAAGA
CCTACTTCTGGAAGGTGCAGCACCACATGGCCCCCACCAAGGATG
AGTTTGACTGCAAGGCCTGGGCCTACTTCTCTGATGTGGACCTGG
AGAAGGATGTGCACTCTGGCCTGATTGGCCCCCTGCTGGTGTGCC
ACACCAACACCCTGAACCCTGCCCATGGCAGGCAGGTGACTGTGC
AGGAGTTTGCCCTGTTCTTCACCATCTTTGATGAAACCAAGAGCT
GGTACTTCACTGAGAACATGGAGAGGAACTGCAGGGCCCCCTGCA
ACATCCAGATGGAGGACCCCACCTTCAAGGAGAACTACAGGTTCC
ATGCCATCAATGGCTACATCATGGACACCCTGCCTGGCCTGGTGA
TGGCCCAGGACCAGAGGATCAGGTGGTACCTGCTGAGCATGGGCA
GCAATGAGAACATCCACAGCATCCACTTCTCTGGCCATGTGTTCA
CTGTGAGGAAGAAGGAGGAGTACAAGATGGCCCTGTACAACCTGT
ACCCTGGGGTGTTTGAGACTGTGGAGATGCTGCCCAGCAAGGCTG
GCATCTGGAGGGTGGAGTGCCTGATTGGGGAGCACCTGCATGCTG
GCATGAGCACCCTGTTCCTGGTGTACAGCAACAAGTGCCAGACCC
CCCTGGGCATGGCCTCTGGCCACATCAGGGACTTCCAGATCACTG
CCTCTGGCCAGTATGGCCAGTGGGCCCCCAAGCTGGCCAGGCTGC
ACTACTCTGGCAGCATCAATGCCTGGAGCACCAAGGAGCCCTTCA
GCTGGATCAAGGTGGACCTGCTGGCCCCCATGATCATCCATGGCA
TCAAGACCCAGGGGGCCAGGCAGAAGTTCAGCAGCCTGTACATCA
GCCAGTTCATCATCATGTACAGCCTGGATGGCAAGAAGTGGCAGA
CCTACAGGGGCAACAGCACTGGCACCCTGATGGTGTTCTTTGGCA
ATGTGGACAGCTCTGGCATCAAGCACAACATCTTCAACCCCCCCA
TCATTGCCAGATACATCAGGCTGCACCCCACCCACTACAGCATCA
GGAGCACCCTGAGGATGGAGCTGATGGGCTGTGACCTGAACAGCT
GCAGCATGCCCCTGGGCATGGAGAGCAAGGCCATCTCTGATGCCC
AGATCACTGCCAGCAGCTACTTCACCAACATGTTTGCCACCTGGA
GCCCCAGCAAGGCCAGGCTGCACCTGCAGGGCAGGAGCAATGCCT
GGAGGCCCCAGGTCAACAACCCCAAGGAGTGGCTGCAGGTGGACT
TCCAGAAGACCATGAAGGTGACTGGGGTGACCACCCAGGGGGTGA
AGAGCCTGCTGACCAGCATGTATGTGAAGGAGTTCCTGATCAGCA
GCAGCCAGGATGGCCACCAGTGGACCCTGTTCTTCCAGAATGGCA
AGGTGAAGGTGTTCCAGGGCAACCAGGACAGCTTCACCCCTGTGG
TGAACAGCCTGGACCCCCCCCTGCTGACCAGATACCTGAGGATTC
ACCCCCAGAGCTGGGTGCACCAGATTGCCCTGAGGATGGAGGTGC
TGGGCTGTGAGGCCCAGGACCTGTACTGATTAATTAAGAGCATCT
TACCGCCATTTATTCCCATATTTGTTCTGTTTTTCTTGATTTGGG
TATACATTTAAATGTTAATAAAACAAAATGGTGGGGCAATCATTT
ACATTTTTAGGGATATGTAATTACTAGTTCAGGTGTATTGCCACA
AGACAAACATGTTAAGAAACTTTCCCGTTATTTACGCTCTGTTCC
TGTTAATCAACCTCTGGATTACAAAATTTGTGAAAGATTGACTGA
TATTCTTAACTATGTTGCTCCTTTTACGCTGTGTGGATATGCTGC
TTTATAGCCTCTGTATCTAGCTATTGCTTCCCGTACGGCTTTCGT
TTTCTCCTCCTTGTATAAATCCTGGTTGCTGTCTCTTTTAGAGGA
GTTGTGGCCCGTTGTCCGTCAACGTGGCGTGGTGTGCTCTGTGTT
TGCTGACGCAACCCCCACTGGCTGGGGCATTGCCACCACCTGTCA
ACTCCTTTCTGGGACTTTCGCTTTCCCCCTCCCGATCGCCACGGC
AGAACTCATCGCCGCCTGCCTTGCCCGCTGCTGGACAGGGGCTAG
GTTGCTGGGCACTGATAATTCCGTGGTGTTGTCTGTGCCTTCTAG
TTGCCAGCCATCTGTTGTTTGCCCCTCCCCCGTGCCTTCCTTGAC
CCTGGAAGGTGCCACTCCCACTGTCCTTTCCTAATAAAATGAGGA
AATTGCATCGCATTGTCTGAGTAGGTGTCATTCTATTCTGGGGGG
TGGGGTGGGGCAGGACAGCAAGGGGGAGGATTGGGAAGACAATAG
CAGGCATGCTGGGGATGCGGTGGGCTCTATGGCGCTAGCCCACAA
TCTGCCTCCCAGTAGTACATGACATTAGTTTATTAATAGCCTAGG
AACCCCTAGTGATGGAGTTGGCCACTCCCTCTCTGCGCGCTCGCT
CGCTCA

### REFERENCES

[0956] All publications and references, including but not limited to patents and patent applications, cited in this specification and Examples herein are incorporated by reference in their entirety as if each individual publication or reference were specifically and individually indicated to be incorporated by reference herein as being fully set forth. Any patent application to which this application claims priority is also incorporated by reference herein in the manner described above for publications and references.

1. A capsid-free close-ended DNA (ceDNA) vector comprising:
at least one nucleic acid sequence between flanking inverted terminal repeats (ITRs), wherein at least one nucleic acid sequence encodes at least one FVIII protein, wherein the at least one nucleic acid sequence that encodes at least one FVIII protein is selected from a sequence having at least 85% identity to any nucleic acid sequence set forth in Table 1A (SEQ ID NOs: 71-183, 556 and 626-633).

2. The ceDNA vector of claim 1, wherein the ceDNA vector comprises a promoter or promoter set operatively linked to the least one nucleic acid sequence that encodes at least one FVIII protein.

3. The ceDNA vector of claim 2, wherein the promoter is selected from the group consisting of: human a1 antitrypsin (hAAT) promoter, minimal transthyretin promoter (TTRm), hAAT_core_C06, hAAT_core_C07, hAAT_core_08, hAAT_core_C09, hAAT_core_C10, and hAAT_core_truncated.

4. The ceDNA vector of claim 2, wherein the promoter is selected from a nucleic acid sequence having at least 85% identity to any one of SEQ ID NOs: 210-217.

5. The ceDNA vector of claim 2, wherein the promoter set comprises a synthetic liver specific promoter set including enhancers and core promoter, without 5pUTR.

6. The ceDNA vector of claim 2, wherein the promoter set is selected from a nucleic acid sequence having at least 85% identity to any one of SEQ ID NOs: 184-197, 400, 401, and 484.

7. The ceDNA vector of any of claims 1-6, wherein the ceDNA vector comprises an enhancer.

8. The ceDNA vector of claim 7, wherein the enhancer is selected from the group consisting of: a Serpin enhancer (SerpEnh), the transthyretin (TTRe) gene enhancer (TTRe), the Hepatic Nuclear Factor 1 binding site (HNF1), Hepatic Nuclear Factor 4 binding site (HNF4), Human apolipoprotein E/C-I liver specific enhancer (ApoE_Enh), the enhancer region from Pro-albumin gene (ProEnh), a CpG minimized version of the ApoE_Enh (Human apolipoprotein E/C-I liver specific enhancer) (ApoE_Enh_C03, ApoE_Enh_C04, ApoE_Enh_C09, and ApoE_Enh_C10), and Hepatic nuclear factor enhancer array embedded in GE-856 (Embedded_enhancer_HNF_array).

9. The ceDNA vector of claim 8, wherein the Serpin enhancer comprises a nucleic acid sequence at least 85% identical to SEQ ID NO: 198.

10. The ceDNA vector of claim 7, wherein the enhancer is selected from a nucleic acid sequence having at least 85% identity to any one of SEQ ID NOs: 198-209, 485 and 557-616.

11. The ceDNA vector of claim 1, wherein the ceDNA vector comprises a 5′ UTR sequence.

12. The ceDNA vector of claim 11, wherein the 5′ UTR sequence is selected from a sequence having at least 85% identity to any sequence in Table 10.

13. The ceDNA vector of claim 1, wherein the ceDNA vector comprises an intron sequence.

14. The ceDNA vector of claim 13, wherein the intron sequence is selected from a sequence having at least 85% identity to any sequence in Table 11.

15. The ceDNA vector of claim 1, wherein the ceDNA vector comprises an exon sequence.

16. The ceDNA vector of claim 15, wherein the exon sequence is selected from a sequence having at least 85% identity to any sequence in Table 12.

17. The ceDNA vector of any of claim 1, wherein the ceDNA vector comprises a 3′ UTR sequence.

18. The ceDNA vector of claim 17, wherein the exon sequence is selected from a sequence having at least 85% identity to any sequence in Table 13.

19. The ceDNA vector of claim 1, wherein the ceDNA vector comprises at least one poly A sequence.

20. The ceDNA vector of claim 1, wherein the ceDNA vector comprises one or more DNA nuclear targeting sequences (DTS).

21. The ceDNA vector of claim 20, wherein the DTS is selected from a sequence having at least 85% identity to any sequence in Table 14.

22. The ceDNA vector of claim 1, wherein the ceDNA vector comprises one or more of the following: Ubiquitous Chromatin-opening Elements (UCOEs), Kozak sequences, spacer sequences or leader sequences.

23. The ceDNA vector of any one of claims 1-22, wherein at least one nucleic acid sequence is cDNA.

24. The ceDNA vector of any one of claims 1-22, wherein at least one ITR comprises a functional terminal resolution site and a Rep binding site.

25. The ceDNA vector of any one of claims 1-24, wherein one or both of the ITRs are from a virus selected from a parvovirus, a dependovirus, and an adeno-associated virus (AAV).

26. The ceDNA vector of any one of claims 1-22, wherein the flanking ITRs are symmetric or asymmetric.

27. The ceDNA vector of claim 26, wherein the flanking ITRs are symmetrical or substantially symmetrical.

28. The ceDNA vector of claim 26, wherein the flanking ITRs are asymmetric.

29. The ceDNA vector of any one of claims 1-28, wherein one or both of the ITRs are wild-type, or wherein both of the ITRs are wild-type.

30. The ceDNA vector of any one of claims 1-29, wherein the flanking ITRs are from different viral serotypes.

31. The ceDNA vector of any one of claims 1-29, wherein the flanking ITRs are from the same viral serotypes.

32. The ceDNA vector of any one of claims 1-31, wherein one or both of the ITRs comprises a sequence selected from the sequences in Table 2, Table 4A, Table 4B, and Table 5.

33. The ceDNA vector of any one of claims 1-32, wherein at least one of the ITRs is altered from a wild-type AAV ITR sequence by a deletion, addition, or substitution that affects the overall three-dimensional conformation of the ITR.

34. The ceDNA vector of any one of claims 1-33, wherein one or both of the ITRs are derived from an AAV serotype selected from AAV1, AAV2, AAV3, AAV4, AAV5, AAV6, AAV7, AAV8, AAV9, AAV10, AAV11, and AAV12.

35. The ceDNA vector of any one of claims 1-34, wherein one or both of the ITRs are synthetic.

36. The ceDNA vector of any one of claims 1-35, wherein one or both of the ITRs is not a wild-type ITR, or wherein both of the ITRs are not wild-type.

37. The ceDNA vector of any one of claims 1-36, wherein one or both of the ITRs is modified by a deletion, insertion, and/or substitution in at least one of the ITR regions selected from A, A′, B, B′, C, C′, D, and D′.

38. The ceDNA vector of claim 37, wherein the deletion, insertion, and/or substitution results in the deletion of all or part of a stem-loop structure normally formed by the A, A′, B, B′ C, or C′ regions.

39. The ceDNA vector of any one of claims 1-37, wherein one or both of the ITRs are modified by a deletion, insertion, and/or substitution that results in the deletion of all or part of a stem-loop structure normally formed by the B and B′ regions.

40. The ceDNA vector of any one of claims 1-37, wherein one or both of the ITRs are modified by a deletion, insertion, and/or substitution that results in the deletion of all or part of a stem-loop structure normally formed by the C and C′ regions.

41. The ceDNA vector of any one of claims 1-37, wherein one or both of the ITRs are modified by a deletion, insertion, and/or substitution that results in the deletion of part of a stem-loop structure normally formed by the B and B′ regions and/or part of a stem-loop structure normally formed by the C and C′ regions.

42. The ceDNA vector of any one of claims 1-41, wherein one or both of the ITRs comprise a single stem-loop structure in the region that normally comprises a first stem-loop structure formed by the B and B′ regions and a second stem-loop structure formed by the C and C′ regions.

43. The ceDNA vector of any one of claims 1-42, wherein one or both of the ITRs comprise a single stem and two loops in the region that normally comprises a first stem-loop structure formed by the B and B′ regions and a second stem-loop structure formed by the C and C′ regions.

44. The ceDNA vector of any one of claims 1-43, wherein one or both of the ITRs comprise a single stem and a single loop in the region that normally comprises a first stem-loop structure formed by the B and B′ regions and a second stem-loop structure formed by the C and C′ regions.

45. The ceDNA vector of any one of claims 1-44, wherein both ITRs are altered in a manner that results in an overall three-dimensional symmetry when the ITRs are inverted relative to each other.

46. The ceDNA vector of any one of claims 1-45, wherein one or both of the ITRs comprises a sequence selected from the sequences in Tables 2, Table 4A, Table 4B, and Table 5.

47. The ceDNA vector of claim 1, wherein the ceDNA vector comprises a nucleic acid sequence selected from a sequence having at least 85% identity with a sequence in Table 18.

48. A method of expressing an FVIII protein in a cell comprising contacting the cell with the ceDNA vector of any one of claims 1-47 or 72-79.

49. The method of claim 48, wherein the cell is a photoreceptor or a RPE cell.

50. The method of claim 48 or 49, wherein the cell in in vitro or in vivo.

51. The method of any one of claims 48-50, wherein the at least one nucleic acid sequence is codon optimized for expression in the eukaryotic cell.

52. The method of any one of claims 48-51, wherein the at least one nucleic acid sequence is a sequence having at least 85% identity to any one of the sequences set forth in Table 1A (SEQ ID NOs: 71-183, 556 and 626-633).

53. A method of treating a subject with hemophilia A, comprising administering to the subject a ceDNA vector of any one of claims 1-47 or 72-79, wherein at least one nucleic acid sequence encodes at least one FVIII protein.

54. A method of treating a subject with hemophilia A, comprising administering to the subject a nucleic acid sequence selected from a sequence having at least 85% identity with a sequence in Table 18.

55. The method of claim 53 or claim 54, wherein a level of FVIII in the plasma of the subject is increased in the subject after administration.

56. The method of claim 55, wherein the level of FVIII in the plasma of the subject is increased by at least about 20%, 30%, 40%, 50%, 60%, 70%, 80%, 90%, 100%, 2-fold, 2.5-fold, 3-fold, 3.5-fold, 4-fold, 5-fold, 10-fold, 15-fold, 20-fold, 25-fold, 30-fold, 40-fold, 50-fold, 60-fold, 70-fold, 80-fold, 90-fold, 100-fold, 200-fold, 300-fold, 400-fold, 500-fold, 600-fold, 700-fold, 800-fold, 900-fold or 1,000-fold after administration.

57. The method of claim 53 or 54, wherein a level of FVIII in the serum of the subject is increased the subject administered the ceDNA vector as compared to a control.

58. The method of claim 57, wherein the increase in the level of FVIII in the serum of the subject is greater than about 40%, 50%, 60%, 70%, 80%, 90%, 100%, 2-fold, 2.5-fold, 3-fold, 3.5-fold, 4-fold, 5-fold, 10-fold, 15-fold, 20-fold, 25-fold, 30-fold, 40-fold, 50-fold, 60-fold, 70-fold, 80-fold, 90-fold, 100-fold, 200-fold, 300-fold, 400-fold, 500-fold, 600-fold, 700-fold, 800-fold, 900-fold or 1,000-fold compared to the control.

59. The method of any one of claims 57-58, wherein the control is a level of FVIII in the serum of the subject prior to administration, wherein the control is a level of FVIII in the serum of a subject having hemophilia A who did not receive the administration or wherein the control is a level of FVIII in a subject not having hemophilia A.

60. The method of any one of claims 53-59, wherein the administration restores a plasma level of FVIII in the subject to at least about 10%, 15%, 20%, 25%, 30%, 35%, 40%, 45%, 50%, 55%, 60%, 65%, 70%, 75%, 80%, 85%, 90% or 95% of a FVIII plasma level of a healthy individual not affected by hemophilia A.

61. The method of any one of claims 53-60, wherein the ceDNA vector is administered at a dose of about 0.1 mg/kg, 0.2 mg/kg, 0.3 mg/kg, 0.4 mg/kg, 0.5 mg/kg, 0.75 mg/kg, 1 mg/kg, 1.5 mg/kg, 2 mg/kg, 2.5 mg/kg, 3 mg/kg, 3.5 mg/kg, 4 mg/kg, 5 mg/kg, 6 mg/kg, 7 mg/kg, 8 mg/kg, 9 mg/kg, or 10 mg/kg.

62. The method of claim 54, wherein the at least one nucleic acid sequence is a sequence having at least 85% identity to any sequence set forth in Table 1A (SEQ ID NOs: 71-183, 556 and 626-633).

63. The method of any of claims 54-62, wherein the ceDNA vector is administered to a photoreceptor cell, or an RPE cell, or both.

64. The method of any of claims 54-63, wherein the ceDNA vector expresses the FVIII protein in a photoreceptor cell, or an RPE cell, or both.

65. The method of any of claims 54-64, wherein the ceDNA vector is administered by any one or more of: subretinal injection, suprachoroidal injection or intravitreal injection.

66. A pharmaceutical composition comprising the ceDNA vector of any one of claims 1-47.

67. A cell containing a ceDNA vector of any of claims 1-47 or 72-79.

68. The cell of claim 67, wherein the cell a photoreceptor cell, or an RPE cell, or both.

69. A composition comprising a ceDNA vector of any of claims 1-47 and a lipid.

70. The composition of claim 69, wherein the lipid is a lipid nanoparticle (LNP).

71. A kit comprising the ceDNA vector of any one of claims 1-47 or 72-79, the pharmaceutical composition of claim 66, the cell of claim 67 or claim 68, or the composition of claim 69 or claim 70.

72. A capsid-free close-ended DNA (ceDNA) vector comprising:
at least one nucleic acid sequence between flanking inverted terminal repeats (ITRs), wherein at least one nucleic acid sequence encodes at least one protein,
wherein the ceDNA vector comprises a promoter or promoter set operatively linked to the least one nucleic acid sequence that encodes the at least one protein, and wherein the promoter is selected from the group consisting of: human a1 antitrypsin (hAAT) promoter, minimal transthyretin promoter (TTRm), hAAT_core_C06, hAAT_core_C07, hAAT_core_08, hAAT_core_C09, hAAT_core_C10, and hAAT_core_truncated.

73. The ceDNA vector of claim 72, wherein the promoter is selected from a nucleic acid sequence having at least 85% identity to any one of SEQ ID NOs: 210-217.

74. The ceDNA vector of claim 72, wherein the promoter set comprises a synthetic liver specific promoter set including enhancers and core promoter, without 5pUTR.

75. The ceDNA vector of claim 72, wherein the promoter set is selected from a nucleic acid sequence having at least 85% identity to any one of SEQ ID NOs: 184-197, 400, 401, and 484.

76. The ceDNA vector of any of claims 72-75, wherein the ceDNA vector comprises an enhancer.

77. The ceDNA vector of claim 76, wherein the enhancer is selected from the group consisting of: a Serpin enhancer (SerpEnh), the transthyretin (TTRe) gene enhancer (TTRe), the Hepatic Nuclear Factor 1 binding site (HNF1), Hepatic Nuclear Factor 4 binding site (HNF4), Human apolipoprotein E/C-I liver specific enhancer (ApoE_Enh), the enhancer region from Pro-albumin gene (ProEnh), a CpG minimized version of the ApoE_Enh (Human apolipoprotein E/C-I liver specific enhancer) (ApoE_Enh_C03, ApoE_Enh_C04, ApoE_Enh_C09, and ApoE_Enh_C10), and Hepatic nuclear factor enhancer array embedded in GE-856 (Embedded_enhancer_HNF_array).

78. The ceDNA vector of claim 77, wherein the Serpin enhancer comprises a nucleic acid sequence at least 85% identical to SEQ ID NO: 198.

79. The ceDNA vector of claim 76, wherein the enhancer is selected from a nucleic acid sequence having at least 85% identity to any one of SEQ ID NOs: 198-209, 485 and 557-616.

80. A method of expressing a protein in a cell comprising contacting the cell with the ceDNA vector of any one of claims 72-79.

81. The method of claim 80, wherein the cell is a photoreceptor or a RPE cell.

82. The method of claim 80 or 81, wherein the cell in in vitro or in vivo.

83. The method of any one of claims 80-82, wherein the at least one nucleic acid sequence is codon optimized for expression in the eukaryotic cell.

84. The ceDNA vector of any one of claims 1-46, wherein the at least one nucleic acid sequence that encodes at least one FVIII protein is selected from a nucleic acid sequence having at least 85% identity to any one of SEQ ID NOs: 556 and 626-633, and wherein the ceDNA vector comprises an enhancer, wherein the enhancer is selected from a nucleic acid sequence having at least 85% identity to any one of SEQ ID NOs: 557-616.

85. A DNA vector comprising a nucleic acid sequence at least 85% identical to SEQ ID NOs: 71-183, 556 and 626-633.

86. The DNA vector of claim 85, wherein the DNA vector comprises an enhancer sequence having at least 95% identity to any one of SEQ ID NOs: 198-209, 485, 557-616.

87. The DNA vector of claim 86, wherein the DNA vector comprises a SerpEnh sequence having at least 95% identity to any one of SEQ ID NOs: 198 and 557-616.

88. The DNA vector of claim 87, wherein the DNA vector comprises a SerpEnh sequence having at least 95% identity to any one of SEQ ID NOs: 557-616.

89. The DNA vector of claim 88, wherein the DNA vector comprises a SerpEnh sequence having at least 95% identity to any one of SEQ ID NOs: 557-568.

90. The DNA vector of claim 88, wherein the DNA vector comprises a SerpEnh sequence having at least 95% identity to any one of SEQ ID NOs: 569 and 570.

91. The DNA vector of claim 88, wherein the DNA vector comprises a SerpEnh sequence having at least 95% identity to any one of SEQ ID NO: 571.

92. The DNA vector of claim 88, wherein the DNA vector comprises a SerpEnh sequence having at least 95% identity to any one of SEQ ID NO: 572.

93. The DNA vector of claim 88, wherein the DNA vector comprises a SerpEnh sequence having at least 95% identity to any one of SEQ ID NO: 611.

94. The DNA vector of claim 88, wherein the DNA vector comprises a SerpEnh sequence having at least 95% identity to any one of SEQ ID NO: 603.

95. The DNA vector of any one of claims 85-94, wherein the DNA vector comprises a TTRe sequence.

96. The DNA vector of claim 95, wherein the TTRe sequence is set forth in SEQ ID NO:
199 or a sequence having at least 95% identity thereof.

97. The DNA vector of claim 95, wherein the DNA vector comprises a TTR promoter.

98. The DNA vector of claim 95, wherein the TTR promoter is set forth in SEQ ID NO: 211 or a sequence having 95% identity thereof.

99. The DNA vector of claim 97, wherein the DNA vector comprises a 5′ untranslated region (5′ UTR) sequence selected from the group consisting of SEQ ID NO: 411, SEQ ID NO: 412, SEQ ID NO: 413, SEQ ID NO: 414, SEQ ID NO: 415, SEQ ID NO: 416, SEQ ID NO: 417, SEQ ID NO: 418, SEQ ID NO: 419, SEQ ID NO: 420, SEQ ID NO: 421, SEQ ID NO: 422, SEQ ID NO: 423, SEQ ID NO: 424, SEQ ID NO: 425, SEQ ID NO: 426, SEQ ID NO: 427, SEQ ID NO: 428, SEQ ID NO: 429, SEQ ID NO: 430, SEQ ID NO: 431, SEQ ID NO: 432, SEQ ID NO: 433, SEQ ID NO: 434, SEQ ID NO: 435, and SEQ ID NO: 436.

100. The DNA vector of claim 97, wherein the DNA vector comprises an intron sequence selected from the group consisting of SEQ ID NO: 235, SEQ ID NO: 236, SEQ ID NO: 237, SEQ ID NO: 238, SEQ ID NO: 239, SEQ ID NO: 240, SEQ ID NO: 241, SEQ ID NO: 242, SEQ ID NO: 243, SEQ ID NO: 245, SEQ ID NO: 246, SEQ ID NO: 247, and SEQ ID NO: 248.

101. The DNA vector of claim 97, wherein the DNA vector further comprises an intron sequence having at least 95% identity to SEQ ID NO: 235.

102. The DNA vector of claim 97, wherein the DNA vector comprises a 3′UTR sequence.

103. The DNA vector of claim 102, wherein the 3′UTR sequence comprises a WPRE element and/or bGH poly A signal sequence or a sequence having at least 95% identity to any one of SEQ ID NOs: 283-291 and 634.

104. The DNA vector of claim 102, wherein the DNA vector comprises a mircroRNA (mir) sequence set forth in SEQ ID NO: 543 or a sequence having at least 95% identity thereof.

105. The DNA vector of claim 97, wherein the DNA vector comprises a spacer sequence selected from a sequence having at least 85% identity to any sequence set forth in Table 15 (SEQ ID NOs:318-332 and 635-641).

106. The DNA vector of claim 85, wherein the DNA vector comprises at least one ITR flanking 5′ and/or 3′ end of the nucleic acid sequence at least 95% identical to SEQ ID NO:556.

107. The DNA vector of claim 106, wherein the at least one ITR flanking 5′ and/or 3′ is a wild-type AAV ITR(s).

108. The DNA vector of claim 85, wherein the DNA vector is a closed-ended DNA (ceDNA).

109. The DNA vector of claim 85, wherein the DNA vector is a plasmid.

110. The DNA vector of claim 85, wherein the DNA vector comprises a nucleic acid sequence encoding a single chain (SC) FVIII.

111. The DNA vector of claim 110, wherein the nucleic acid sequence is set forth in SEQ ID NO: 556 or a sequence having at least 99% identity thereto.

112. A ceDNA vector comprising a nucleic acid sequence of SEQ ID NO: 42 or a nucleic acid sequence at least 85%, 90%, 91%, 92%, 93%, 94%, 95%, 96%, 97%, 98%, or 99% identical to SEQ ID NO: 42.

113. A ceDNA vector comprising a nucleic acid sequence of SEQ ID NO: 642 or a nucleic acid sequence at least 85%, 90%, 91%, 92%, 93%, 94%, 95%, 96%, 97%, 98%, or 99% identical to SEQ ID NO: 642.

114. A ceDNA vector comprising a nucleic acid sequence of SEQ ID NO: 643 or a nucleic acid sequence at least 85%, 90%, 91%, 92%, 93%, 94%, 95%, 96%, 97%, 98%, or 99% identical to SEQ ID NO: 643.

115. A ceDNA vector comprising a nucleic acid sequence of SEQ ID NO: 644 or a nucleic acid sequence at least 85%, 90%, 91%, 92%, 93%, 94%, 95%, 96%, 97%, 98%, or 99% identical to SEQ ID NO: 644.

116. A ceDNA vector comprising a nucleic acid sequence of SEQ ID NO: 645 or a nucleic acid sequence at least 85%, 90%, 91%, 92%, 93%, 94%, 95%, 96%, 97%, 98%, or 99% identical to SEQ ID NO: 645.

117. A ceDNA vector comprising a nucleic acid sequence of SEQ ID NO: 646 or a nucleic acid sequence at least 85%, 90%, 91%, 92%, 93%, 94%, 95%, 96%, 97%, 98%, or 99% identical to SEQ ID NO: 646.

The application's sequence listing, which the Patent Office published only in electronic form, follows.

SEQUENCE LISTING (641 sequences)

SEQ ID NO: 1 - DNA, 5065 bp, Artificial Sequence
  Description of Artificial Sequence: Synthetic polynucleotide
cctgcaggcagctgcgcgctcgctcgctcactgaggccgcccgggcaaagcccgggcgtcgggcgacctttggtcgcccggcctcagtgagcgagcgagcgcgcagagagggagtggccaactccatcactaggggttccttgtagttaatgattaacccgccatgctacttatctacgtagccatgctctagagtttgctgcttgcaatgtttgcccattttagggtggacacaggacgctgtggtttctgagccagggggcgactcagatcccagccagtggacttagcccctgtttgctcctccgataactggggtgaccttggttaatattcaccagcagcctcccccgttgcccctctggatccactgcttaaatacggacgaggacagggccctgtctcctcagcttcaggcaccaccactgacctgggacagtgaatcgccaccatgcagattgagctgagcacctgcttcttcctgtgcctgctgaggttctgcttctctgccaccaggagatactacctgggggctgtggagctgagctgggactacatgcagtctgacctgggggagctgcctgtggatgccaggttcccccccagagtgcccaagagcttccccttcaacacctctgtggtgtacaagaagaccctgtttgtggagttcactgaccacctgttcaacattgccaagcccaggcccccctggatgggcctgctgggccccaccatccaggctgaggtgtatgacactgtggtgatcaccctgaagaacatggccagccaccctgtgagcctgcatgctgtgggggtgagctactggaaggcctctgagggggctgagtatgatgaccagaccagccagagggagaaggaggatgacaaggtgttccctgggggcagccacacctatgtgtggcaggtgctgaaggagaatggccccatggcctctgaccccctgtgcctgacctacagctacctgagccatgtggacctggtgaaggacctgaactctggcctgattggggccctgctggtgtgcagggagggcagcctggccaaggagaagacccagaccctgcacaagttcatcctgctgtttgctgtgtttgatgagggcaagagctggcactctgaaaccaagaacagcctgatgcaggacagggatgctgcctctgccagggcctggcccaagatgcacactgtgaatggctatgtgaacaggagcctgcctggcctgattggctgccacaggaagtctgtgtactggcatgtgattggcatgggcaccacccctgaggtgcacagcatcttcctggagggccacaccttcctggtcaggaaccacaggcaggccagcctggagatcagccccatcaccttcctgactgcccagaccctgctgatggacctgggccagttcctgctgttctgccacatcagcagccaccagcatgatggcatggaggcctatgtgaaggtggacagctgccctgaggagccccagctgaggatgaagaacaatgaggaggctgaggactatgatgatgacctgactgactctgagatggatgtggtgaggtttgatgatgacaacagccccagcttcatccagatcaggtctgtggccaagaagcaccccaagacctgggtgcactacattgctgctgaggaggaggactgggactatgcccccctggtgctggcccctgatgacaggagctacaagagccagtacctgaacaatggcccccagaggattggcaggaagtacaagaaggtcaggttcatggcctacactgatgaaaccttcaagaccagggaggccatccagcatgagtctggcatcctgggccccctgctgtatggggaggtgggggacaccctgctgatcatcttcaagaaccaggccagcaggccctacaacatctacccccatggcatcactgatgtgaggcccctgtacagcaggaggctgcccaagggggtgaagcacctgaaggacttccccatcctgcctggggagatcttcaagtacaagtggactgtgactgtggaggatggccccaccaagtctgaccccaggtgcctgaccagatactacagcagctttgtgaacatggagagggacctggcctctggcctgattggccccctgctgatctgctacaaggagtctgtggaccagaggggcaaccagatcatgtctgacaagaggaatgtgatcctgttctctgtgtttgatgagaacaggagctggtacctgactgagaacatccagaggttcctgcccaaccctgctggggtgcagctggaggaccctgagttccaggccagcaacatcatgcacagcatcaatggctatgtgtttgacagcctgcagctgtctgtgtgcctgcatgaggtggcctactggtacatcctgagcattggggcccagactgacttcctgtctgtgttcttctctggctacaccttcaagcacaagatggtgtatgaggacaccctgaccctgttccccttctctggggagactgtgttcatgagcatggagaaccctggcctgtggattctgggctgccacaactctgacttcaggaacaggggcatgactgccctgctgaaagtctccagctgtgacaagaacactggggactactatgaggacagctatgaggacatctctgcctacctgctgagcaagaacaatgccattgagcccaggagcttcagccagaaccccccagtgctgaagaggcaccagagggagatcaccaggaccaccctgcagtctgaccaggaggagattgactatgatgacaccatctctgtggagatgaagaaggaggactttgacatctacgacgaggacgagaaccagagccccaggagcttccagaagaagaccaggcactacttcattgctgctgtggagaggctgtgggactatggcatgagcagcagcccccatgtgctgaggaacagggcccagtctggctctgtgccccagttcaagaaggtggtgttccaggagttcactgatggcagcttcacccagcccctgtacagaggggagctgaatgagcacctgggcctgctgggcccctacatcagggctgaggtggaggacaacatcatggtgaccttcaggaaccaggccagcaggccctacagcttctacagcagcctgatcagctatgaggaggaccagaggcagggggctgagcccaggaagaactttgtgaagcccaatgaaaccaagacctacttctggaaggtgcagcaccacatggcccccaccaaggatgagtttgactgcaaggcctgggcctacttctctgatgtggacctggagaaggatgtgcactctggcctgattggccccctgctggtgtgccacaccaacaccctgaaccctgcccatggcaggcaggtgactgtgcaggagtttgccctgttcttcaccatctttgatgaaaccaagagctggtacttcactgagaacatggagaggaactgcagggccccctgcaacatccagatggaggaccccaccttcaaggagaactacaggttccatgccatcaatggctacatcatggacaccctgcctggcctggtgatggcccaggaccagaggatcaggtggtacctgctgagcatgggcagcaatgagaacatccacagcatccacttctctggccatgtgttcactgtgaggaagaaggaggagtacaagatggccctgtacaacctgtaccctggggtgtttgagactgtggagatgctgcccagcaaggctggcatctggagggtggagtgcctgattggggagcacctgcatgctggcatgagcaccctgttcctggtgtacagcaacaagtgccagacccccctgggcatggcctctggccacatcagggacttccagatcactgcctctggccagtatggccagtgggcccccaagctggccaggctgcactactctggcagcatcaatgcctggagcaccaaggagcccttcagctggatcaaggtggacctgctggcccccatgatcatccatggcatcaagacccagggggccaggcagaagttcagcagcctgtacatcagccagttcatcatcatgtacagcctggatggcaagaagtggcagacctacaggggcaacagcactggcaccctgatggtgttctttggcaatgtggacagctctggcatcaagcacaacatcttcaacccccccatcattgccagatacatcaggctgcaccccacccactacagcatcaggagcaccctgaggatggagctgatgggctgtgacctgaacagctgcagcatgcccctgggcatggagagcaaggccatctctgatgcccagatcactgccagcagctacttcaccaacatgtttgccacctggagccccagcaaggccaggctgcacctgcagggcaggagcaatgcctggaggccccaggtcaacaaccccaaggagtggctgcaggtggacttccagaagaccatgaaggtgactggggtgaccacccagggggtgaagagcctgctgaccagcatgtatgtgaaggagttcctgatcagcagcagccaggatggccaccagtggaccctgttcttccagaatggcaaggtgaaggtgttccagggcaaccaggacagcttcacccctgtggtgaacagcctggacccccccctgctgaccagatacctgaggattcacccccagagctgggtgcaccagattgccctgaggatggaggtgctgggctgtgaggcccaggacctgtactgaaataaaagatctttattttcattagatctgtgtgttggttttttgtgtgtctagagcatggctacgtagataagtagcatggcgggttaatcattaactacacctgcaggaggaacccctagtgatggagttggccactccctctctgcgcgctcgctcgctcactgaggccgggcgaccaaaggtcgcccgacgcccgggcggcctcagtgagcgagcgagcgcgcagctgcctgcagg

SEQ ID NO: 2 - DNA, 5163 bp, Artificial Sequence
  Description of Artificial Sequence: Synthetic polynucleotide
cctgcaggcagctgcgcgctcgctcgctcactgaggccgcccgggcaaagcccgggcgtcgggcgacctttggtcgcccggcctcagtgagcgagcgagcgcgcagagagggagtggccaactccatcactaggggttccttgtagttaatgattaacccgccatgctacttatctacgtagccatgctctagagtctgtctgcacatttcgtagagcgagtgttccgatactctaatctccctaggcaaggttcatattgacttaggttacttattctccttttgttgactaagtcaataatcagaatcagcaggtttggagtcagcttggcagggatcagcagcctgggttggaaggagggggtataaaagccccttcaccaggagaagccgtcacacagatccacaagctcctgctagcaggtaagtgccgtgtgtggttcccgcgggcctggcctctttacgggttatggcccttgcgtgccttgaattactgacactgacatccactttttctttttctccacaggtttaaacgccaccatgcagattgagctgagcacctgcttcttcctgtgtctgctgaggttctgcttctctgccaccaggaggtattacctgggggctgtggagctgagctgggactatatgcagtctgacctgggggagctgcctgtggatgctaggttcccccccagggtgcccaagagcttcccctttaacacttctgtggtgtacaagaagaccctgtttgtggagttcactgaccacctgttcaacattgccaagcccaggcccccctggatggggctgctggggcccaccatccaggctgaggtgtatgacactgtggtgatcaccctgaagaacatggccagccaccctgtgagcctgcatgctgtgggggtgagctactggaaggcttctgagggggctgagtatgatgaccagactagccagagggagaaggaggatgacaaggtgtttcctgggggcagccatacctatgtgtggcaggtgctgaaggagaatggccccatggcctctgaccccctgtgcctgacctacagctacctgtctcatgtggacctggtgaaggacctgaactctggcctgattggggctctgctggtgtgtagggagggcagcctggctaaggaaaagacccagaccctgcataagtttatcctgctgtttgctgtgtttgatgagggcaagagctggcactctgagaccaagaacagcctgatgcaggatagggatgctgcctctgccagggcttggcctaagatgcacactgtgaatgggtatgtgaataggagcctgcctggcctgattggctgccacaggaagtctgtgtactggcatgtgattgggatgggcaccacccctgaggtccatagcatcttcctggagggccacactttcctggtgaggaaccacagacaggcctctctggagatctctcccatcaccttcctgactgctcagactctgctgatggacctgggccagttcctgctgttttgccatattagcagccaccagcatgatgggatggaggcctatgtgaaggtggatagctgccctgaggagcctcagctgaggatgaagaacaatgaggaggctgaagactatgatgatgacctgactgattctgagatggatgtggtgaggtttgatgatgacaatagccccagcttcattcagatcaggtctgtggccaagaaacaccccaagacctgggtgcactacattgctgctgaggaagaggactgggactatgctcccctggtgctggcccctgatgataggtcttataagagccagtacctgaacaatgggccccagaggattggcaggaagtacaagaaggtgaggttcatggcctacactgatgaaaccttcaaaaccagggaggccattcagcatgagtctggcatcctgggccctctgctgtatggggaggtgggggacaccctgctgatcatcttcaagaaccaggccagcaggccctacaacatctatcctcatggcatcactgatgtgaggcccctgtacagcaggaggctgcccaagggggtgaagcacctgaaagacttccccatcctgcctggggagatctttaagtataagtggactgtgactgtggaggatggccctaccaagtctgaccccaggtgtctgaccaggtactattctagctttgtgaacatggagagggacctggcctctggcctgattgggcccctgctgatctgctacaaggagtctgtggaccagaggggcaaccagatcatgtctgacaagaggaatgtgatcctgttttctgtgtttgatgagaataggagctggtacctgactgagaacatccagaggtttctgcccaatcctgctggggtgcagctggaggatcctgagttccaggccagcaatatcatgcatagcatcaatggctatgtgtttgacagcctgcagctgtctgtgtgcctgcatgaggtggcctactggtacatcctgagcattggggcccagactgactttctgtctgtgttcttttctggctataccttcaagcacaagatggtgtatgaggataccctgaccctgttccccttctctggggagactgtgttcatgagcatggagaatcctgggctgtggatcctggggtgccacaactctgattttaggaacagggggatgactgccctgctgaaggtgtctagctgtgataagaacactggggactactatgaggacagctatgaggacatttctgcttatctgctgtctaagaataatgccattgagcccagaagcttcagccagaatccccctgtgctgaagagacatcagagggagatcaccagaactaccctgcagtctgatcaggaggagattgactatgatgacactatctctgtggagatgaagaaggaggactttgacatctatgatgaggatgagaatcagtctcccaggagctttcagaagaagaccagacattacttcattgctgctgtggagaggctgtgggactatggcatgagctctagccctcatgtgctgaggaacagggcccagtctggctctgtgccccagttcaagaaggtggtgttccaggaattcactgatggcagcttcacccagcccctgtacaggggggagctgaatgagcacctgggcctgctggggccttatatcagggctgaggtggaggataatattatggtgactttcaggaaccaggccagcaggccctactctttctatagcagcctgatctcttatgaggaggatcagaggcagggggctgagcctaggaagaactttgtgaagcccaatgagactaagacctacttctggaaggtccagcaccacatggcccctaccaaggatgagtttgactgcaaggcctgggcctatttctctgatgtggatctggagaaggatgtccattctgggctgattggccccctgctggtgtgccacactaacactctgaatcctgcccatggcaggcaggtgactgtccaggagtttgccctgttcttcactatctttgatgagaccaagagctggtactttactgagaacatggagaggaactgcagagctccttgcaatattcagatggaggaccccaccttcaaggagaattacaggttccatgccattaatgggtacatcatggacaccctgcctggcctggtgatggctcaggaccagaggatcaggtggtacctgctgagcatgggctctaatgagaatatccacagcatccacttctctgggcatgtgttcactgtgaggaagaaggaggagtacaagatggctctgtataatctgtaccctggggtgtttgaaactgtggagatgctgccctctaaggctggcatctggagggtggagtgcctgattggggagcacctgcatgctggcatgagcaccctgttcctggtgtacagcaacaagtgccagacccccctgggcatggcctctggccacatcagggacttccagatcactgcctctggccagtatggccagtgggcccccaagctggccaggctgcactattctggcagcatcaatgcctggagcaccaaggagcccttcagctggatcaaggtggacctgctggcccccatgatcattcatggcatcaagacccagggggccaggcagaagttcagctctctgtacatctctcagttcatcatcatgtactctctggatgggaagaagtggcagacctacaggggcaacagcactggcaccctgatggtgttctttgggaatgtggactcttctggcatcaagcacaacatcttcaatccccccatcattgctaggtatattaggctgcatcccacccactacagcatcaggtctaccctgaggatggagctgatgggctgtgacctgaactcttgcagcatgcccctgggcatggagtctaaggccatctctgatgcccagattactgccagcagctacttcaccaacatgtttgccacctggagcccctctaaggccaggctgcatctgcaggggaggagcaatgcctggaggcctcaggtgaacaaccccaaggagtggctgcaggtggatttccagaagaccatgaaggtgactggggtgaccacccagggggtcaagagcctgctgaccagcatgtatgtgaaggagttcctgatcagcagcagccaggatggccaccagtggactctgttctttcagaatgggaaggtgaaggtgtttcagggcaatcaggactctttcacccctgtggtgaacagcctggacccccccctgctgaccagatacctgaggatccacccccagtcttgggtgcatcagattgccctgaggatggaggtgctgggctgtgaggctcaggatctgtactgagcggccgcaataaaagatcagagctctagagatctgtgtgttggttttttgtgttctagagcatggctacgtagataagtagcatggcgggttaatcattaactacacctgcaggaggaacccctagtgatggagttggccactccctctctgcgcgctcgctcgctcactgaggccgggcgaccaaaggtcgcccgacgcccgggcggcctcagtgagcgagcgagcgcgcagctgcctgcagg

SEQ ID NO: 3 - DNA, 5257 bp, Artificial Sequence
  Description of Artificial Sequence: Synthetic polynucleotide
cctgcaggcagctgcgcgctcgctcgctcactgaggccgcccgggcaaagcccgggcgtcgggcgacctttggtcgcccggcctcagtgagcgagcgagcgcgcagagagggagtggccaactccatcactaggggttccttgtagttaatgattaacccgccatgctacttatctacgtagccatgctctagaggaaccattgccaccttcagggggaggctgctggtgaatattaaccaagatcaccccagttaccggaggagcaaacagggactaagttcacacgcgtggtaccgtctgtctgcacatttcgtagagcgagtgttccgatactctaatctccctaggcaaggttcatatttgtgtaggttacttattctccttttgttgactaagtcaataatcagaatcagcaggtttggagtcagcttggcagggatcagcagcctgggttggaaggagggggtataaaagccccttcaccaggagaagccgtcacacagatccacaagctcctgaagaggtaagggtttaagttatcgttagttcgtgcaccattaatgtttaattacctggagcacctgcctgaaatcatttttttttcaggttggctagtatgcagatcgagctctccacctgcttctttctgtgcctgttgagattctgcttcagcgccaccaggagatactacctgggggctgtggagctgagctgggactacatgcagtctgacctgggggagctgcctgtggatgccaggttcccccccagagtgcccaagagcttccccttcaacacctctgtggtgtacaagaagaccctgtttgtggagttcactgaccacctgttcaacattgccaagcccaggcccccctggatgggcctgctgggccccaccatccaggctgaggtgtatgacactgtggtgatcaccctgaagaacatggccagccaccctgtgagcctgcatgctgtgggggtgagctactggaaggcctctgagggggctgagtatgatgaccagaccagccagagggagaaggaggatgacaaggtgttccctgggggcagccacacctatgtgtggcaggtgctgaaggagaatggccccatggcctctgaccccctgtgcctgacctacagctacctgagccatgtggacctggtgaaggacctgaactctggcctgattggggccctgctggtgtgcagggagggcagcctggccaaggagaagacccagaccctgcacaagttcatcctgctgtttgctgtgtttgatgagggcaagagctggcactctgaaaccaagaacagcctgatgcaggacagggatgctgcctctgccagggcctggcccaagatgcacactgtgaatggctatgtgaacaggagcctgcctggcctgattggctgccacaggaagtctgtgtactggcatgtgattggcatgggcaccacccctgaggtgcacagcatcttcctggagggccacaccttcctggtcaggaaccacaggcaggccagcctggagatcagccccatcaccttcctgactgcccagaccctgctgatggacctgggccagttcctgctgttctgccacatcagcagccaccagcatgatggcatggaggcctatgtgaaggtggacagctgccctgaggagccccagctgaggatgaagaacaatgaggaggctgaggactatgatgatgacctgactgactctgagatggatgtggtgaggtttgatgatgacaacagccccagcttcatccagatcaggtctgtggccaagaagcaccccaagacctgggtgcactacattgctgctgaggaggaggactgggactatgcccccctggtgctggcccctgatgacaggagctacaagagccagtacctgaacaatggcccccagaggattggcaggaagtacaagaaggtcaggttcatggcctacactgatgaaaccttcaagaccagggaggccatccagcatgagtctggcatcctgggccccctgctgtatggggaggtgggggacaccctgctgatcatcttcaagaaccaggccagcaggccctacaacatctacccccatggcatcactgatgtgaggcccctgtacagcaggaggctgcccaagggggtgaagcacctgaaggacttccccatcctgcctggggagatcttcaagtacaagtggactgtgactgtggaggatggccccaccaagtctgaccccaggtgcctgaccagatactacagcagctttgtgaacatggagagggacctggcctctggcctgattggccccctgctgatctgctacaaggagtctgtggaccagaggggcaaccagatcatgtctgacaagaggaatgtgatcctgttctctgtgtttgatgagaacaggagctggtacctgactgagaacatccagaggttcctgcccaaccctgctggggtgcagctggaggaccctgagttccaggccagcaacatcatgcacagcatcaatggctatgtgtttgacagcctgcagctgtctgtgtgcctgcatgaggtggcctactggtacatcctgagcattggggcccagactgacttcctgtctgtgttcttctctggctacaccttcaagcacaagatggtgtatgaggacaccctgaccctgttccccttctctggggagactgtgttcatgagcatggagaaccctggcctgtggattctgggctgccacaactctgacttcaggaacaggggcatgactgccctgctgaaagtctccagctgtgacaagaacactggggactactatgaggacagctatgaggacatctctgcctacctgctgagcaagaacaatgccattgagcccaggagcttcagccagaatccacccgtccttaagcgccatcagcgcgagatcaccaggaccaccctgcagtctgaccaggaggagattgactatgatgacaccatctctgtggagatgaagaaggaggactttgacatctacgacgaggacgagaaccagagccccaggagcttccagaagaagaccaggcactacttcattgctgctgtggagaggctgtgggactatggcatgagcagcagcccccatgtgctgaggaacagggcccagtctggctctgtgccccagttcaagaaggtggtgttccaggagttcactgatggcagcttcacccagcccctgtacagaggggagctgaatgagcacctgggcctgctgggcccctacatcagggctgaggtggaggacaacatcatggtgaccttcaggaaccaggccagcaggccctacagcttctacagcagcctgatcagctatgaggaggaccagaggcagggggctgagcccaggaagaactttgtgaagcccaatgaaaccaagacctacttctggaaggtgcagcaccacatggcccccaccaaggatgagtttgactgcaaggcctgggcctacttctctgatgtggacctggagaaggatgtgcactctggcctgattggccccctgctggtgtgccacaccaacaccctgaaccctgcccatggcaggcaggtgactgtgcaggagtttgccctgttcttcaccatctttgatgaaaccaagagctggtacttcactgagaacatggagaggaactgcagggccccctgcaacatccagatggaggaccccaccttcaaggagaactacaggttccatgccatcaatggctacatcatggacaccctgcctggcctggtgatggcccaggaccagaggatcaggtggtacctgctgagcatgggcagcaatgagaacatccacagcatccacttctctggccatgtgttcactgtgaggaagaaggaggagtacaagatggccctgtacaacctgtaccctggggtgtttgagactgtggagatgctgcccagcaaggctggcatctggagggtggagtgcctgattggggagcacctgcatgctggcatgagcaccctgttcctggtgtacagcaacaagtgccagacccccctgggcatggcctctggccacatcagggacttccagatcactgcctctggccagtatggccagtgggcccccaagctggccaggctgcactactctggcagcatcaatgcctggagcaccaaggagcccttcagctggatcaaggtggacctgctggcccccatgatcatccatggcatcaagacccagggggccaggcagaagttcagcagcctgtacatcagccagttcatcatcatgtacagcctggatggcaagaagtggcagacctacaggggcaacagcactggcaccctgatggtgttctttggcaatgtggacagctctggcatcaagcacaacatcttcaacccccccatcattgccagatacatcaggctgcaccccacccactacagcatcaggagcaccctgaggatggagctgatgggctgtgacctgaacagctgcagcatgcccctgggcatggagagcaaggccatctctgatgcccagatcactgccagcagctacttcaccaacatgtttgccacctggagccccagcaaggccaggctgcatctgcagggcaggagcaatgcctggaggccccaggtcaacaaccccaaggagtggctgcaggtggacttccagaagaccatgaaggtgactggggtgaccacccagggggtgaagagcctgctgaccagcatgtatgtgaaggagttcctgatcagcagcagccaggatggccaccagtggaccctgttcttccagaatggcaaggtgaaggtgttccagggcaaccaggacagcttcacccctgtggtgaacagcctggacccccccctgctgaccagatacctgaggattcacccccagagctgggtgcaccagattgccctgaggatggaggtgctgggctgtgaggcccaggacctgtactgaggatccaataaaatatctttattttcattacatctgtgtgttggttttttgtgtgttttcctgtaacgatcgggtctagagcatggctacgtagataagtagcatggcgggttaatcattaactacacctgcaggaggaacccctagtgatggagttggccactccctctctgcgcgctcgctcgctcactgaggccgggcgaccaaaggtcgcccgacgcccgggcggcctcagtgagcgagcgagcgcgcagctgcctgcagg

SEQ ID NO: 4 - DNA, 6628 bp, Artificial Sequence
  Description of Artificial Sequence: Synthetic polynucleotide
cctgcaggcagctgcgcgctcgctcgctcactgaggccgcccgggcaaagcccgggcgtcgggcgacctttggtcgcccggcctcagtgagcgagcgagcgcgcagagagggagtggccaactccatcactaggggttccttgtagttaatgattaacccgccatgctacttatctacgtagccatgctctagacgggggaggctgctggtgaatattaaccaaggtcaccccagttatcggaggagcaaacaggggctaagtccacacgcgtggtaccgtctgtctgcacatttcgtagagcgagtgttccgatactctaatctccctaggcaaggttcatatttgtgtaggttacttattctccttttgttgactaagtcaataatcagaatcagcaggtttggagtcagcttggcagggatcagcagcctgggttggaaggagggggtataaaagccccttcaccaggagaagccgtcacacagatccacaagctcctgaagaggtaagggtttaagggatggttggttggtggggtattaatgtttaattacctggagcacctgcctgaaatcactttttttcaggttggtttaaacgccgccaccatgcaaattgagttaagtacctgttttttcctgtgcctgttgagattttgcttctctgctaccagaaggtattacctgggagctgtggagctgtcatgggactacatgcagtctgacctgggagagctccctgttgatgctaggtttccccctagggtgccaaagtcctttccttttaacacctcagtggtgtacaagaagacactgtttgtggagtttactgaccacctcttcaatattgctaagccaagacccccttggatgggtctcttgggccctaccatccaggctgaggtttatgatacagtggtgattaccctcaagaatatggcttctcatcctgttagtctgcatgcagtaggggtcagctattggaaggccagtgaaggagctgagtatgatgaccagaccagccagagagagaaagaggatgacaaggtgttccctgggggatcacacacctatgtgtggcaggtgttgaaggaaaatggacccatggcctctgacccactctgcctgacttactcctacctgtctcatgtggacctggtcaaagatctgaactctggcctgattggggcactgttggtgtgcagagaagggtctcttgccaaggagaagactcagaccctgcacaagttcatcctgctgtttgctgtgtttgatgaaggcaagtcttggcattctgagactaagaacagcctgatgcaagatagagatgctgcatctgccagggcctggcctaagatgcacactgtgaatggatatgtgaataggtccttgcctggcctgattggatgccataggaagtctgtgtactggcatgtgattggcatgggcaccacccctgaggttcactctatttttctggagggccatactttccttgtgaggaatcatagacaggcctctctggagattagccctattacatttctgactgctcagaccctcctcatggacttggggcagtttctgttaagctgccacatcagcagccatcaacatgatggtatggaagcctatgtcaaagtggatagctgccctgaagaaccacagcttaggatgaagaacaatgaggaggcagaggactatgatgatgatctgactgattctgaaatggatgtggtgagatttgatgatgataatagcccttcctttatccagatcaggtcagtggccaagaagcacccaaagacctgggtgcattatattgctgctgaggaggaggactgggactatgcccctctggtgctggcccctgatgatagaagctataagtctcaatacttgaataatggcccacagaggattgggagaaagtacaaaaaggtgagatttatggcctacactgatgagactttcaagaccagagaggccatccagcatgaatcaggcattttgggtcccctgctgtatggagaggtgggggataccctgctgatcatctttaagaaccaggccagcagaccttacaacatttaccctcatgggatcacagatgtgaggccactctactctaggagattgcccaagggagtcaagcatcttaaggactttccaatcctgcctggggagatcttcaagtacaaatggacagtgacagttgaggatggacctactaagagtgaccccaggtgtctgaccagatattactctagctttgtcaatatggaaagagacctggcttcaggcttgataggccctcttctcatctgctacaaagagtctgtggaccagagaggaaatcagattatgtctgacaagagaaatgttattctgttttcagtctttgatgagaacagaagttggtacttgacagagaacattcagagatttctgcctaaccctgcaggagtgcagcttgaggaccctgagtttcaggcttccaatatcatgcattctatcaatggctatgtgtttgatagcctgcagctgtctgtgtgcctgcatgaggttgcctattggtacatcctgtctattggggcccaaactgatttcttgtctgtgtttttcagtggatatacctttaagcataagatggtgtatgaagataccttgacacttttccctttctcaggagagactgtcttcatgtctatggagaaccctggactgtggatcctgggatgccacaactcagacttcagaaacaggggtatgacagctctgcttaaggtctcctcatgtgacaaaaatacaggagactactatgaagattcctatgaggacatctctgcttacctgctcagcaaaaacaatgccattgagcccagaagcttcagccagaattccagacatcccagtactaggcagaagcagtttaatgccaccaccatcccagaaaatgacattgagaagacagacccttggtttgcccatagaaccccaatgcccaagattcagaatgtgagcagctcagacttgctgatgctgctgaggcagtctcctactccccatggcctgtccctctcagatctgcaggaagccaagtatgagacattttctgatgacccctccccaggggctattgacagtaacaacagcctgtctgaaatgacccacttcagacctcagctccaccacagtggggatatggtgtttaccccagagtcaggcctgcagctgagactgaatgagaagctgggaaccacagctgccacagaactgaagaagctggatttcaaggtgagctctacttcaaataatctgatttccactatcccatctgacaatttggcagctggcactgacaatacaagctctctgggcccacctagcatgccagtgcattatgacagccagttggacaccactctttttggaaagaaatccagtcccctgacagagtcaggaggacccctttctctgtctgaggagaacaatgatagtaagcttctggagtcaggcttgatgaactcccaggagagttcttggggcaagaatgtgagctctagggagatcaccagaaccactctgcagtctgaccaagaagagattgattatgatgacactatctctgttgagatgaagaaggaggactttgatatctatgatgaggatgagaaccagtctccaagaagtttccagaagaagaccaggcactactttattgctgctgtggagagactgtgggactatggaatgtcctcctcccctcatgtcctgagaaatagagctcagtcaggatcagtgccccagttcaagaaggtggtgttccaggaattcacagatggaagttttacccagccactgtatagaggtgaactgaatgaacatctgggtctgctggggccctatatcagggctgaggtggaggacaatattatggtgacctttagaaaccaggcctcaaggccctacagcttctactcttccctcatttcatatgaggaagaccagagacagggagcagagcctagaaagaactttgtcaagcccaatgaaaccaaaacctatttctggaaggtgcagcaccacatggcacccaccaaagatgagtttgactgcaaagcctgggcctatttctcagatgtggatctggagaaggatgtccattcaggtctgattggaccactcctggtgtgccacaccaacacactgaatccagctcatggcagacaggtgacagtccaggagtttgccctgtttttcactatttttgatgagaccaagagctggtattttacagagaatatggaaagaaactgcagagccccttgtaatatccagatggaggacccaacctttaaggagaactacaggttccatgccatcaatggctacattatggataccctgcctggcctggttatggcccaggatcagaggatcaggtggtatctgctgtcaatgggctccaatgagaacattcatagtattcacttttcaggacatgtgttcacagtgagaaagaaggaggagtataagatggccctctataatctctacccaggggtgtttgagacagttgagatgctgccatctaaggcaggcatctggagagtggaatgcctcattggagagcacctgcatgctggcatgtccaccctgtttctggtgtactccaacaaatgtcagacccctcttggtatggcctctggccacattagggatttccagattactgccagtggtcagtatgggcagtgggcccctaagctggccagactgcactattctgggagcatcaatgcctggtccaccaaggaacctttttcttggattaaagtggatctgctggccccaatgatcatccatgggatcaagacccagggagctaggcagaagttcagcagcctgtacattagtcagttcatcattatgtacagtctggatggcaaaaagtggcagacatacaggggcaattccactggaaccctgatggtgttctttggaaatgtggatagcagtggtatcaagcacaacattttcaaccctcccatcattgccaggtacatcagactgcatccaacccactacagcattaggagcacccttaggatggagctcatggggtgtgacctgaactcttgctctatgccacttggaatggagagcaaggccatctctgatgcccagattactgctagttcctacttcaccaatatgtttgccacctggtcacccagcaaggccaggctgcacctgcagggaaggtccaatgcttggaggcctcaggtgaacaatccaaaggagtggctgcaggtggacttccagaagactatgaaggtgacaggagtgaccactcagggagtgaagagcctgctgacctccatgtatgtgaaggagtttctgatctccagctcccaggatggccaccagtggaccctgttctttcagaatggcaaggtgaaggtgtttcaggggaatcaggactccttcaccccagtggtgaattccctggatccccctctgctgaccagatacctgagaatccacccccagtcttgggtgcaccagattgcccttaggatggaggtgctgggctgtgaggcccaggacctgtactgattaattaagagcatcttaccgccatttattcccatatttgttctgtttttcttgatttgggtatacatttaaatgttaataaaacaaaatggtggggcaatcatttacatttttagggatatgtaattactagttcaggtgtattgccacaagacaaacatgttaagaaactttcccgttatttacgctctgttcctgttaatcaacctctggattacaaaatttgtgaaagattgactgatattcttaactatgttgctccttttacgctgtgtggatatgctgctttatagcctctgtatctagctattgcttcccgtacggctttcgttttctcctccttgtataaatcctggttgctgtctcttttagaggagttgtggcccgttgtccgtcaacgtggcgtggtgtgctctgtgtttgctgacgcaacccccactggctggggcattgccaccacctgtcaactcctttctgggactttcgctttccccctcccgatcgccacggcagaactcatcgccgcctgccttgcccgctgctggacaggggctaggttgctgggcactgataattccgtggtgttgtctgtgccttctagttgccagccatctgttgtttgcccctcccccgtgccttccttgaccctggaaggtgccactcccactgtcctttcctaataaaatgaggaaattgcatcgcattgtctgagtaggtgtcattctattctggggggtggggtggggcaggacagcaagggggaggattgggaagacaatagcaggcatgctggggatgcggtgggctctatggctctagagcatggctacgtagataagtagcatggcgggttaatcattaactacacctgcaggaggaacccctagtgatggagttggccactccctctctgcgcgctcgctcgctcactgaggccgggcgaccaaaggtcgcccgacgcccgggcggcctcagtgagcgagcgagcgcgcagctgcctgcagg

SEQ ID NO: 5 - DNA, 6628 bp, Artificial Sequence
  Description of Artificial Sequence: Synthetic polynucleotide
cctgcaggcagctgcgcgctcgctcgctcactgaggccgcccgggcaaagcccgggcgtcgggcgacctttggtcgcccggcctcagtgagcgagcgagcgcgcagagagggagtggccaactccatcactaggggttccttgtagttaatgattaacccgccatgctacttatctacgtagccatgctctagacgggggaggctgctggtgaatattaaccaaggtcaccccagttatcggaggagcaaacaggggctaagtccacacgcgtggtaccgtctgtctgcacatttcgtagagcgagtgttccgatactctaatctccctaggcaaggttcatatttgtgtaggttacttattctccttttgttgactaagtcaataatcagaatcagcaggtttggagtcagcttggcagggatcagcagcctgggttggaaggagggggtataaaagccccttcaccaggagaagccgtcacacagatccacaagctcctgaagaggtaagggtttaagggatggttggttggtggggtattaatgtttaattacctggagcacctgcctgaaatcactttttttcaggttggtttaaacgccgccaccatgcagattgagctgagcacctgcttcttcctgtgcctgctgaggttctgcttctctgccaccaggagatactacctgggggctgtggagctgagctgggactacatgcagtctgacctgggggagctgcctgtggatgccaggttcccccccagagtgcccaagagcttccccttcaacacctctgtggtgtacaagaagaccctgtttgtggagttcactgaccacctgttcaacattgccaagcccaggcccccctggatgggcctgctgggccccaccatccaggctgaggtgtatgacactgtggtgatcaccctgaagaacatggccagccaccctgtgagcctgcatgctgtgggggtgagctactggaaggcctctgagggggctgagtatgatgaccagaccagccagagggagaaggaggatgacaaggtgttccctgggggcagccacacctatgtgtggcaggtgctgaaggagaatggccccatggcctctgaccccctgtgcctgacctacagctacctgagccatgtggacctggtgaaggacctgaactctggcctgattggggccctgctggtgtgcagggagggcagcctggccaaggagaagacccagaccctgcacaagttcatcctgctgtttgctgtgtttgatgagggcaagagctggcactctgaaaccaagaacagcctgatgcaggacagggatgctgcctctgccagggcctggcccaagatgcacactgtgaatggctatgtgaacaggagcctgcctggcctgattggctgccacaggaagtctgtgtactggcatgtgattggcatgggcaccacccctgaggtgcacagcatcttcctggagggccacaccttcctggtcaggaaccacaggcaggccagcctggagatcagccccatcaccttcctgactgcccagaccctgctgatggacctgggccagttcctgctgagctgccacatcagcagccaccagcatgatggcatggaggcctatgtgaaggtggacagctgccctgaggagccccagctgaggatgaagaacaatgaggaggctgaggactatgatgatgacctgactgactctgagatggatgtggtgaggtttgatgatgacaacagccccagcttcatccagatcaggtctgtggccaagaagcaccccaagacctgggtgcactacattgctgctgaggaggaggactgggactatgcccccctggtgctggcccctgatgacaggagctacaagagccagtacctgaacaatggcccccagaggattggcaggaagtacaagaaggtcaggttcatggcctacactgatgaaaccttcaagaccagggaggccatccagcatgagtctggcatcctgggccccctgctgtatggggaggtgggggacaccctgctgatcatcttcaagaaccaggccagcaggccctacaacatctacccccatggcatcactgatgtgaggcccctgtacagcaggaggctgcccaagggggtgaagcacctgaaggacttccccatcctgcctggggagatcttcaagtacaagtggactgtgactgtggaggatggccccaccaagtctgaccccaggtgcctgaccagatactacagcagctttgtgaacatggagagggacctggcctctggcctgattggccccctgctgatctgctacaaggagtctgtggaccagaggggcaaccagatcatgtctgacaagaggaatgtgatcctgttctctgtgtttgatgagaacaggagctggtacctgactgagaacatccagaggttcctgcccaaccctgctggggtgcagctggaggaccctgagttccaggccagcaacatcatgcacagcatcaatggctatgtgtttgacagcctgcagctgtctgtgtgcctgcatgaggtggcctactggtacatcctgagcattggggcccagactgacttcctgtctgtgttcttctctggctacaccttcaagcacaagatggtgtatgaggacaccctgaccctgttccccttctctggggagactgtgttcatgagcatggagaaccctggcctgtggattctgggctgccacaactctgacttcaggaacaggggcatgactgccctgctgaaagtctccagctgtgacaagaacactggggactactatgaggacagctatgaggacatctctgcctacctgctgagcaagaacaatgccattgagcccaggagcttcagccagaatagcaggcaccccagcaccaggcagaagcagttcaatgccaccaccatcccagagaatgatattgagaagactgacccttggtttgcccacaggacccccatgccaaagattcagaatgtgtcctcatctgacttgctgatgctgctgaggcagagccccacaccccatgggctgagcctgtctgacctgcaggaggccaaatatgaaaccttttcagatgaccccagcccaggagccattgacagtaacaacagcctgtctgagatgacccacttcaggccccagctccatcactctggggacatggtgttcaccccagagtcaggcctgcagctgaggctgaatgagaagctgggcaccacagcagccactgagctgaagaagctggactttaaggtgtccagcacctccaacaacctgatcagcaccatcccctctgacaacctggcagctggcactgataacacctccagcctgggcccaccttctatgcctgtgcactatgacagccaactggacaccaccctgtttgggaagaagtcctctccactgacagagtctggagggcccctgtccctgtctgaggagaacaatgactccaagctgctggagtctgggctgatgaacagtcaggagagctcctggggaaagaatgtgtccagcagggagatcaccaggaccaccctgcagtctgaccaggaggagattgactatgatgacaccatctctgtggagatgaagaaggaggactttgacatctacgacgaggacgagaaccagagccccaggagcttccagaagaagaccaggcactacttcattgctgctgtggagaggctgtgggactatggcatgagcagcagcccccatgtgctgaggaacagggcccagtctggctctgtgccccagttcaagaaggtggtgttccaggagttcactgatggcagcttcacccagcccctgtacagaggggagctgaatgagcacctgggcctgctgggcccctacatcagggctgaggtggaggacaacatcatggtgaccttcaggaaccaggccagcaggccctacagcttctacagcagcctgatcagctatgaggaggaccagaggcagggggctgagcccaggaagaactttgtgaagcccaatgaaaccaagacctacttctggaaggtgcagcaccacatggcccccaccaaggatgagtttgactgcaaggcctgggcctacttctctgatgtggacctggagaaggatgtgcactctggcctgattggccccctgctggtgtgccacaccaacaccctgaaccctgcccatggcaggcaggtgactgtgcaggagtttgccctgttcttcaccatctttgatgaaaccaagagctggtacttcactgagaacatggagaggaactgcagggccccctgcaacatccagatggaggaccccaccttcaaggagaactacaggttccatgccatcaatggctacatcatggacaccctgcctggcctggtgatggcccaggaccagaggatcaggtggtacctgctgagcatgggcagcaatgagaacatccacagcatccacttctctggccatgtgttcactgtgaggaagaaggaggagtacaagatggccctgtacaacctgtaccctggggtgtttgagactgtggagatgctgcccagcaaggctggcatctggagggtggagtgcctgattggggagcacctgcatgctggcatgagcaccctgttcctggtgtacagcaacaagtgccagacccccctgggcatggcctctggccacatcagggacttccagatcactgcctctggccagtatggccagtgggcccccaagctggccaggctgcactactctggcagcatcaatgcctggagcaccaaggagcccttcagctggatcaaggtggacctgctggcccccatgatcatccatggcatcaagacccagggggccaggcagaagttcagcagcctgtacatcagccagttcatcatcatgtacagcctggatggcaagaagtggcagacctacaggggcaacagcactggcaccctgatggtgttctttggcaatgtggacagctctggcatcaagcacaacatcttcaacccccccatcattgccagatacatcaggctgcaccccacccactacagcatcaggagcaccctgaggatggagctgatgggctgtgacctgaacagctgcagcatgcccctgggcatggagagcaaggccatctctgatgcccagatcactgccagcagctacttcaccaacatgtttgccacctggagccccagcaaggccaggctgcacctgcagggcaggagcaatgcctggaggccccaggtcaacaaccccaaggagtggctgcaggtggacttccagaagaccatgaaggtgactggggtgaccacccagggggtgaagagcctgctgaccagcatgtatgtgaaggagttcctgatcagcagcagccaggatggccaccagtggaccctgttcttccagaatggcaaggtgaaggtgttccagggcaaccaggacagcttcacccctgtggtgaacagcctggacccccccctgctgaccagatacctgaggattcacccccagagctgggtgcaccagattgccctgaggatggaggtgctgggctgtgaggcccaggacctgtactgattaattaagagcatcttaccgccatttattcccatatttgttctgtttttcttgatttgggtatacatttaaatgttaataaaacaaaatggtggggcaatcatttacatttttagggatatgtaattactagttcaggtgtattgccacaagacaaacatgttaagaaactttcccgttatttacgctctgttcctgttaatcaacctctggattacaaaatttgtgaaagattgactgatattcttaactatgttgctccttttacgctgtgtggatatgctgctttatagcctctgtatctagctattgcttcccgtacggctttcgttttctcctccttgtataaatcctggttgctgtctcttttagaggagttgtggcccgttgtccgtcaacgtggcgtggtgtgctctgtgtttgctgacgcaacccccactggctggggcattgccaccacctgtcaactcctttctgggactttcgctttccccctcccgatcgccacggcagaactcatcgccgcctgccttgcccgctgctggacaggggctaggttgctgggcactgataattccgtggtgttgtctgtgccttctagttgccagccatctgttgtttgcccctcccccgtgccttccttgaccctggaaggtgccactcccactgtcctttcctaataaaatgaggaaattgcatcgcattgtctgagtaggtgtcattctattctggggggtggggtggggcaggacagcaagggggaggattgggaagacaatagcaggcatgctggggatgcggtgggctctatggctctagagcatggctacgtagataagtagcatggcgggttaatcattaactacacctgcaggaggaacccctagtgatggagttggccactccctctctgcgcgctcgctcgctcactgaggccgggcgaccaaaggtcgcccgacgcccgggcggcctcagtgagcgagcgagcgcgcagctgcctgcagg

SEQ ID NO: 6 - DNA, 6007 bp, Artificial Sequence
  Description of Artificial Sequence: Synthetic polynucleotide
cctgcaggcagctgcgcgctcgctcgctcactgaggccgcccgggcaaagcccgggcgtcgggcgacctttggtcgcccggcctcagtgagcgagcgagcgcgcagagagggagtggccaactccatcactaggggttccttgtagttaatgattaacccgccatgctacttatctacgtagccatgctctagacgggggaggctgctggtgaatattaaccaaggtcaccccagttatcggaggagcaaacaggggctaagtccacacgcgtggtaccgtctgtctgcacatttcgtagagcgagtgttccgatactctaatctccctaggcaaggttcatatttgtgtaggttacttattctccttttgttgactaagtcaataatcagaatcagcaggtttggagtcagcttggcagggatcagcagcctgggttggaaggagggggtataaaagccccttcaccaggagaagccgtcacacagatccacaagctcctgaagaggtaagggtttaagggatggttggttggtggggtattaatgtttaattacctggagcacctgcctgaaatcactttttttcaggttggtttaaacgccgccaccatgcaaatagagctctccacctgcttctttctgtgccttttgcgattctgctttagtgccaccagaagatactacctgggtgcagtggaactgtcatgggactatatgcaaagtgatctcggtgagctgcctgtggacgcaagatttcctcctagagtgccaaaatcttttccattcaacacctcagtcgtgtacaaaaagactctgtttgtagaattcacggatcaccttttcaacatcgctaagccaaggccaccctggatgggtctgctaggtcctaccatccaggctgaggtttatgatacagtggtcattacacttaagaacatggcttcccatcctgtcagtcttcatgctgttggtgtatcctactggaaagcttctgagggagctgaatatgatgatcagaccagtcaaagggagaaagaagatgataaagtcttccctggtggaagccatacatatgtctggcaggtcctgaaagagaatggtccaatggcctctgacccactgtgccttacctactcatatctttctcatgtggacctggtaaaagacttgaattcaggcctcattggagccctactagtatgtagagaagggagtctggccaaggaaaagacacagaccttgcacaaatttatactactttttgctgtatttgatgaagggaaaagttggcactcagaaacaaagaactccttgatgcaggatagggatgctgcatctgctcgggcctggcctaaaatgcacacagtcaatggttatgtaaacaggtctctgccaggtctgattggatgccacaggaaatcagtctattggcatgtgattggaatgggcaccactcctgaagtgcactcaatattcctcgaaggtcacacatttcttgtgaggaaccatcgccaggcgtccttggaaatctcgccaataactttccttactgctcaaacactcttgatggaccttggacagtttctactgttttgtcatatctcttcccaccaacatgatggcatggaagcttatgtcaaagtagacagctgtccagaggaaccccaactacgaatgaaaaataatgaagaagcggaagactatgatgatgatcttactgattctgaaatggatgtggtcaggtttgatgatgacaactctccttcctttatccaaattcgctcagttgccaagaagcatcctaaaacttgggtacattacattgctgctgaagaggaggactgggactatgctcccttagtcctcgcccccgatgacagaagttataaaagtcaatatttgaacaatggccctcagcggattggtaggaagtacaaaaaagtccgatttatggcatacacagatgaaacctttaagactcgtgaagctattcagcatgaatcaggaatcttgggacctttactttatggggaagttggagacacactgttgattatatttaagaatcaagcaagcagaccatataacatctaccctcacggaatcactgatgtccgtcctttgtattcaaggagattaccaaaaggtgtaaaacatttgaaggattttccaattctgccaggagaaatattcaaatataaatggacagtgactgtagaagatgggccaactaaatcagatcctcggtgcctgacccgctattactctagtttcgttaatatggagagagatctagcttcaggactcattggccctctcctcatctgctacaaagaatctgtagatcaaagaggaaaccagataatgtcagacaagaggaatgtcatcctgttttctgtatttgatgagaaccgaagctggtacctcacagagaatatacaacgctttctccccaatccagctggagtgcagcttgaggatccagagttccaagcctccaacatcatgcacagcatcaatggctatgtttttgatagtttgcagttgtcagtttgtttgcatgaggtggcatactggtacattctaagcattggagcacagactgacttcctttctgtcttcttctctggatataccttcaaacacaaaatggtctatgaagacacactcaccctattcccattctcaggagaaactgtcttcatgtcgatggaaaacccaggtctatggattctggggtgccacaactcagactttcggaacagaggcatgaccgccttactgaaggtttctagttgtgacaagaacactggtgattattacgaggacagttatgaagatatttcagcatacttgctgagtaaaaacaatgccattgaaccaagaagcttctcccagaattcaagacaccctagcactaggcaaaagcaatttaatgccaccacaattccagaaaatactactcttcagtcagatcaagaggaaattgactatgatgataccatatcagttgaaatgaagaaggaagattttgacatttatgatgaggatgaaaatcagagcccccgcagctttcaaaagaaaacacgacactattttattgctgcagtggagaggctctgggattatgggatgagtagctccccacatgttctaagaaacagggctcagagtggcagtgtccctcagttcaagaaagttgttttccaggaatttactgatggctcctttactcagcccttataccgtggagaactaaatgaacatttgggactcctggggccatatataagagcagaagttgaagataatatcatggtaactttcagaaatcaggcctctcgtccctattccttctattctagccttatttcttatgaggaagatcagaggcaaggagcagaacctagaaaaaactttgtcaagcctaatgaaaccaaaacttacttttggaaagtgcaacatcatatggcacccactaaagatgagtttgactgcaaagcctgggcttatttctctgatgttgacctggaaaaagatgtgcactcaggcctgattggaccccttctggtctgccacactaacacactgaaccctgctcatgggagacaagtgacagtacaggaatttgctctgtttttcaccatctttgatgagaccaaaagctggtacttcactgaaaatatggaaagaaactgcagggctccctgcaatatccagatggaagatcccacttttaaagagaattatcgcttccatgcaatcaatggctacataatggatacactacctggcttagtaatggctcaggatcaaaggattcgatggtatctgctcagcatgggcagcaatgaaaacatccattctattcatttcagtggacatgtgttcactgtacgaaaaaaagaggagtataaaatggcactgtacaatctctatccaggtgtttttgagacagtggaaatgttaccatccaaagctggaatttggcgggtggaatgccttattggcgagcatctacatgctgggatgagcacactttttctggtgtacagcaataagtgtcagactcccctgggaatggcttctggacacattagagattttcagattacagcttcaggacaatatggacagtgggccccaaagctggccagacttcattattccggatcaatcaatgcctggagcaccaaggagcccttttcttggatcaaggtggatctgttggcaccaatgattattcacggcatcaagacccagggtgcccgtcagaagttctccagcctctacatctctcagtttatcatcatgtatagtcttgatgggaagaagtggcagacttatcgaggaaattccactggaaccttaatggtcttctttggcaatgtggattcatctgggataaaacacaatatttttaaccctccaattattgctcgatacatccgtttgcacccaactcattatagcattcgcagcactcttcgcatggagttgatgggctgtgatttaaatagttgcagcatgccattgggaatggagagtaaagcaatatcagatgcacagattactgcttcatcctactttaccaatatgtttgccacctggtctccttcaaaagctcgacttcacctccaagggaggagtaatgcctggagacctcaggtgaataatccaaaagagtggctgcaagtggacttccagaagacaatgaaagtcacaggagtaactactcagggagtaaaatctctgcttaccagcatgtatgtgaaggagttcctcatctccagcagtcaagatggccatcagtggactctcttttttcagaatggcaaagtaaaggtttttcagggaaatcaagactccttcacacctgtggtgaactctctagacccaccgttactgactcgctaccttcgaattcacccccagagttgggtgcaccagattgccctgaggatggaggttctgggctgcgaggcacaggacctctactgattaattaagagcatcttaccgccatttattcccatatttgttctgtttttcttgatttgggtatacatttaaatgttaataaaacaaaatggtggggcaatcatttacatttttagggatatgtaattactagttcaggtgtattgccacaagacaaacatgttaagaaactttcccgttatttacgctctgttcctgttaatcaacctctggattacaaaatttgtgaaagattgactgatattcttaactatgttgctccttttacgctgtgtggatatgctgctttatagcctctgtatctagctattgcttcccgtacggctttcgttttctcctccttgtataaatcctggttgctgtctcttttagaggagttgtggcccgttgtccgtcaacgtggcgtggtgtgctctgtgtttgctgacgcaacccccactggctggggcattgccaccacctgtcaactcctttctgggactttcgctttccccctcccgatcgccacggcagaactcatcgccgcctgccttgcccgctgctggacaggggctaggttgctgggcactgataattccgtggtgttgtctgtgccttctagttgccagccatctgttgtttgcccctcccccgtgccttccttgaccctggaaggtgccactcccactgtcctttcctaataaaatgaggaaattgcatcgcattgtctgagtaggtgtcattctattctggggggtggggtggggcaggacagcaagggggaggattgggaagacaatagcaggcatgctggggatgcggtgggctctatggctctagagcatggctacgtagataagtagcatggcgggttaatcattaactacacctgcaggaggaacccctagtgatggagttggccactccctctctgcgcgctcgctcgctcactgaggccgggcgaccaaaggtcgcccgacgcccgggcggcctcagtgagcgagcgagcgcgcagctgcctgcagg

SEQ ID NO: 7 - DNA, 6007 bp, Artificial Sequence
  Description of Artificial Sequence: Synthetic polynucleotide
cctgcaggcagctgcgcgctcgctcgctcactgaggccgcccgggcaaagcccgggcgtcgggcgacctttggtcgcccggcctcagtgagcgagcgagcgcgcagagagggagtggccaactccatcactaggggttccttgtagttaatgattaacccgccatgctacttatctacgtagccatgctctagacgggggaggctgctggtgaatattaaccaaggtcaccccagttatcggaggagcaaacaggggctaagtccacacgcgtggtaccgtctgtctgcacatttcgtagagcgagtgttccgatactctaatctccctaggcaaggttcatatttgtgtaggttacttattctccttttgttgactaagtcaataatcagaatcagcaggtttggagtcagcttggcagggatcagcagcctgggttggaaggagggggtataaaagccccttcaccaggagaagccgtcacacagatccacaagctcctgaagaggtaagggtttaagggatggttggttggtggggtattaatgtttaattacctggagcacctgcctgaaatcactttttttcaggttggtttaaacgccgccaccatgcaaattgagttatccacctgtttcttcctctgtctcctgaggttctgcttctctgccaccaggagatactacctgggggctgtggagctgtcctgggactacatgcagtcagacctgggggagctgccagttgatgccaggttcccccccagagtccccaagtccttccccttcaacacctcagtggtgtacaaaaagaccctgtttgtggagttcacagaccacctgttcaacatagccaagcccaggcccccctggatgggcctgctgggccccaccatccaggcagaggtttatgacacagtggtcatcaccctgaagaacatggcctcccaccctgtgtccctccatgctgtgggggtgagctactggaaggccagtgagggggcagaatatgatgaccagaccagccagagggagaaggaggatgacaaggtgttcccagggggcagccacacctatgtgtggcaggtcctgaaggagaatggccccatggcctctgaccccctctgcctcacctactcctacctgtcccatgtggacctggtgaaggacctcaactctggcctgattggagccctcctggtgtgcagggaggggagcctggccaaggaaaagacccagaccctgcacaagtttatcctgctctttgcagtctttgatgaggggaagtcctggcacagtgagaccaagaactccctgatgcaggacagagatgctgcctcagccagggcctggcccaagatgcacacagtgaatgggtatgtcaacaggagcctgccaggcctgattgggtgccacagaaagtcagtgtactggcatgtcattggcatgggcaccaccccagaggtgcactccatcttcctggagggccacaccttcctggtgaggaaccacagacaggccagcctggagatcagcccaatcaccttcctcacagcccagaccctcctcatggacctgggccagtttctcctgagctgccacatctcctcccaccagcatgatggcatggaggcctatgtgaaggtggacagctgccctgaggagccccagctcaggatgaagaacaatgaggaggcagaggactatgatgatgatctgacagactctgagatggatgtggtgagatttgatgatgacaacagcccctccttcatccagatcaggtctgtggccaagaagcaccctaagacctgggtgcactacattgcagctgaggaggaggactgggactatgcccccctggtcctggcccctgatgataggtcctacaagtcccagtacctgaacaatggcccccagaggatagggagaaagtacaagaaggtgaggttcatggcctacactgatgagaccttcaagactagggaagccatccagcatgagtctgggatcctgggccccctcctctatggggaggtgggggacaccctgctgatcatcttcaagaaccaggccagcaggccctacaacatttacccccatgggatcacagatgtgagacccctgtacagcaggagactgccaaagggggtgaagcacctgaaggacttccccatcctgccaggggagatcttcaagtacaagtggactgtgacagtggaggatgggcccaccaaatctgaccctagatgcctgaccagatactacagcagctttgtgaacatggagagggacctggcctctggactgattggccctctgctgatctgctacaaggagagtgtggaccagaggggaaaccagatcatgtctgacaagaggaatgtgatcctgttctcagtgtttgatgagaacagatcctggtacctcactgagaacatccagaggttcctgcccaacccagcaggggtgcagctggaggacccagagttccaggcctccaacatcatgcactccatcaatggctatgtctttgactccctgcagctgtcagtgtgcctgcatgaggtggcctactggtacatcctctccattggagcccagactgacttcctgtcagtcttcttcagtggctacaccttcaagcacaagatggtctatgaggacactctgaccctgttccccttctctggggagactgtgttcatgtccatggagaaccctggactgtggatcctgggctgccacaacagtgacttcaggaacaggggcatgactgccctgctgaaggtctccagctgtgacaagaacactggggactactatgaggactcctatgaggacatctctgcctacctgctgtccaagaacaatgccattgagcccaggtccttctcccagaacagcagacacccctccaccaggcagaagcagttcaatgcaaccaccatccctgaaaataccaccctgcagagtgaccaggaggagattgactatgatgacaccatctctgtggagatgaagaaggaggactttgacatctatgatgaggatgagaaccagagccctagaagcttccagaagaagaccagacactacttcattgctgcagtggaaagactgtgggactatgggatgagctcctccccccatgtgctgaggaacagggcccagtctggctctgtgccccagttcaagaaggtggtgttccaggagttcactgatggctccttcacccagcccctgtacaggggagagctgaatgagcacctgggcctgctgggcccctacatcagggctgaggtggaggacaatatcatggtgaccttcagaaaccaggcctccagaccttactccttctacagcagcctgatctcctatgaggaggaccagagacagggggctgagcccaggaagaactttgtgaagcccaatgagaccaagacctacttctggaaggtgcagcaccacatggcccccaccaaggatgagtttgactgcaaggcctgggcctacttctctgatgtggacctggagaaggatgtgcactctggcctgattggccccctgctggtgtgccacaccaacaccctgaaccctgcccatggcaggcaggtgactgtgcaggagtttgccctgttcttcaccatctttgatgagaccaagagctggtacttcactgagaacatggagaggaactgcagggccccctgcaacatccagatggaggaccccaccttcaaggagaactacaggttccatgccatcaatggctacatcatggacaccctgcctggcctggtgatggcccaggaccagaggatcaggtggtacctgctgagcatggggagcaatgagaacatccacagcatccacttctctggccatgtgttcacagtgaggaagaaggaggagtacaagatggccctgtacaacctgtaccctggggtgtttgagacagtggagatgctgccctccaaggctggaatctggagggtggagtgcctgattggggagcacctgcatgctggcatgagcaccctgttcctggtgtacagcaacaagtgccagacccccctgggcatggcctctggccacatcagagacttccagatcacagcctcaggccagtatggccagtgggcccccaagctggccaggctgcactactctggcagcatcaatgcctggtccaccaaggagcccttcagctggatcaaggtggacctcctggcccccatgatcatccatggcatcaagacccagggggccaggcagaagttcagctccctgtacatctcccagttcatcatcatgtactccctggatggcaagaagtggcagacctacagaggcaacagcacaggcaccctgatggtgttctttggcaatgtggacagctctgggatcaagcacaacatcttcaacccccccatcattgccaggtacatcagactgcaccccacccactactccatcaggtccaccctgagaatggagctgatgggctgtgacctgaacagctgcagcatgcccctgggcatggagagcaaggccatctctgatgcccagatcacagccagcagctacttcaccaacatgtttgccacctggtcccccagcaaggccaggctgcacctgcagggcaggagcaatgcctggaggccccaggtgaacaaccccaaggagtggctgcaggtggacttccagaagaccatgaaggtgacaggggtgaccacccagggggtgaagtccctgctgaccagcatgtatgtgaaggagttcctgatcagcagctcccaggatggccaccagtggaccctgttcttccagaatggcaaggtgaaggtgttccagggcaaccaggacagcttcacccctgtggtgaactccctggacccccccctgctgaccagatacctgaggatccacccccagtcctgggtgcaccagattgccctgagaatggaggtgctgggctgtgaggcccaggacctgtactgattaattaagagcatcttaccgccatttattcccatatttgttctgtttttcttgatttgggtatacatttaaatgttaataaaacaaaatggtggggcaatcatttacatttttagggatatgtaattactagttcaggtgtattgccacaagacaaacatgttaagaaactttcccgttatttacgctctgttcctgttaatcaacctctggattacaaaatttgtgaaagattgactgatattcttaactatgttgctccttttacgctgtgtggatatgctgctttatagcctctgtatctagctattgcttcccgtacggctttcgttttctcctccttgtataaatcctggttgctgtctcttttagaggagttgtggcccgttgtccgtcaacgtggcgtggtgtgctctgtgtttgctgacgcaacccccactggctggggcattgccaccacctgtcaactcctttctgggactttcgctttccccctcccgatcgccacggcagaactcatcgccgcctgccttgcccgctgctggacaggggctaggttgctgggcactgataattccgtggtgttgtctgtgccttctagttgccagccatctgttgtttgcccctcccccgtgccttccttgaccctggaaggtgccactcccactgtcctttcctaataaaatgaggaaattgcatcgcattgtctgagtaggtgtcattctattctggggggtggggtggggcaggacagcaagggggaggattgggaagacaatagcaggcatgctggggatgcggtgggctctatggctctagagcatggctacgtagataagtagcatggcgggttaatcattaactacacctgcaggaggaacccctagtgatggagttggccactccctctctgcgcgctcgctcgctcactgaggccgggcgaccaaaggtcgcccgacgcccgggcggcctcagtgagcgagcgagcgcgcagctgcctgcagg

SEQ ID NO: 8 - DNA, 6007 bp, Artificial Sequence
  Description of Artificial Sequence: Synthetic polynucleotide
cctgcaggcagctgcgcgctcgctcgctcactgaggccgcccgggcaaagcccgggcgtcgggcgacctttggtcgcccggcctcagtgagcgagcgagcgcgcagagagggagtggccaactccatcactaggggttccttgtagttaatgattaacccgccatgctacttatctacgtagccatgctctagacgggggaggctgctggtgaatattaaccaaggtcaccccagttatcggaggagcaaacaggggctaagtccacacgcgtggtaccgtctgtctgcacatttcgtagagcgagtgttccgatactctaatctccctaggcaaggttcatatttgtgtaggttacttattctccttttgttgactaagtcaataatcagaatcagcaggtttggagtcagcttggcagggatcagcagcctgggttggaaggagggggtataaaagccccttcaccaggagaagccgtcacacagatccacaagctcctgaagaggtaagggtttaagggatggttggttggtggggtattaatgtttaattacctggagcacctgcctgaaatcactttttttcaggttggtttaaacgccgccaccatgcaaattgagttatccacctgtttcttcctctgtctcctgaggttctgcttctctgccaccaggagatactacctgggggctgtggagctgtcctgggactacatgcagtcagacctgggggagctgccagttgatgccaggttcccccccagagtccccaagtccttccccttcaacacctcagtggtgtacaaaaagaccctgtttgtggagttcacagaccacctgttcaacatagccaagcccaggcccccctggatgggcctgctgggccccaccatccaggcagaggtttatgacacagtggtcatcaccctgaagaacatggcctcccaccctgtgtccctccatgctgtgggggtgagctactggaaggccagtgagggggcagaatatgatgaccagaccagccagagggagaaggaggatgacaaggtgttcccagggggcagccacacctatgtgtggcaggtcctgaaggagaatggccccatggcctctgaccccctctgcctcacctactcctacctgtcccatgtggacctggtgaaggacctcaactctggcctgattggagccctcctggtgtgcagggaggggagcctggccaaggaaaagacccagaccctgcacaagtttatcctgctctttgcagtctttgatgaggggaagtcctggcacagtgagaccaagaactccctgatgcaggacagagatgctgcctcagccagggcctggcccaagatgcacacagtgaatgggtatgtcaacaggagcctgccaggcctgattgggtgccacagaaagtcagtgtactggcatgtcattggcatgggcaccaccccagaggtgcactccatcttcctggagggccacaccttcctggtgaggaaccacagacaggccagcctggagatcagcccaatcaccttcctcacagcccagaccctcctcatggacctgggccagtttctcctgttctgccacatctcctcccaccagcatgatggcatggaggcctatgtgaaggtggacagctgccctgaggagccccagctcaggatgaagaacaatgaggaggcagaggactatgatgatgatctgacagactctgagatggatgtggtgagatttgatgatgacaacagcccctccttcatccagatcaggtctgtggccaagaagcaccctaagacctgggtgcactacattgcagctgaggaggaggactgggactatgcccccctggtcctggcccctgatgataggtcctacaagtcccagtacctgaacaatggcccccagaggatagggagaaagtacaagaaggtgaggttcatggcctacactgatgagaccttcaagactagggaagccatccagcatgagtctgggatcctgggccccctcctctatggggaggtgggggacaccctgctgatcatcttcaagaaccaggccagcaggccctacaacatttacccccatgggatcacagatgtgagacccctgtacagcaggagactgccaaagggggtgaagcacctgaaggacttccccatcctgccaggggagatcttcaagtacaagtggactgtgacagtggaggatgggcccaccaaatctgaccctagatgcctgaccagatactacagcagctttgtgaacatggagagggacctggcctctggactgattggccctctgctgatctgctacaaggagagtgtggaccagaggggaaaccagatcatgtctgacaagaggaatgtgatcctgttctcagtgtttgatgagaacagatcctggtacctcactgagaacatccagaggttcctgcccaacccagcaggggtgcagctggaggacccagagttccaggcctccaacatcatgcactccatcaatggctatgtctttgactccctgcagctgtcagtgtgcctgcatgaggtggcctactggtacatcctctccattggagcccagactgacttcctgtcagtcttcttcagtggctacaccttcaagcacaagatggtctatgaggacactctgaccctgttccccttctctggggagactgtgttcatgtccatggagaaccctggactgtggatcctgggctgccacaacagtgacttcaggaacaggggcatgactgccctgctgaaggtctccagctgtgacaagaacactggggactactatgaggactcctatgaggacatctctgcctacctgctgtccaagaacaatgccattgagcccaggtccttctcccagaacagcagacacccctccaccaggcagaagcagttcaatgcaaccaccatccctgaaaataccaccctgcagagtgaccaggaggagattgactatgatgacaccatctctgtggagatgaagaaggaggactttgacatctatgatgaggatgagaaccagagccctagaagcttccagaagaagaccagacactacttcattgctgcagtggaaagactgtgggactatgggatgagctcctccccccatgtgctgaggaacagggcccagtctggctctgtgccccagttcaagaaggtggtgttccaggagttcactgatggctccttcacccagcccctgtacaggggagagctgaatgagcacctgggcctgctgggcccctacatcagggctgaggtggaggacaatatcatggtgaccttcagaaaccaggcctccagaccttactccttctacagcagcctgatctcctatgaggaggaccagagacagggggctgagcccaggaagaactttgtgaagcccaatgagaccaagacctacttctggaaggtgcagcaccacatggcccccaccaaggatgagtttgactgcaaggcctgggcctacttctctgatgtggacctggagaaggatgtgcactctggcctgattggccccctgctggtgtgccacaccaacaccctgaaccctgcccatggcaggcaggtgactgtgcaggagtttgccctgttcttcaccatctttgatgagaccaagagctggtacttcactgagaacatggagaggaactgcagggccccctgcaacatccagatggaggaccccaccttcaaggagaactacaggttccatgccatcaatggctacatcatggacaccctgcctggcctggtgatggcccaggaccagaggatcaggtggtacctgctgagcatggggagcaatgagaacatccacagcatccacttctctggccatgtgttcacagtgaggaagaaggaggagtacaagatggccctgtacaacctgtaccctggggtgtttgagacagtggagatgctgccctccaaggctggaatctggagggtggagtgcctgattggggagcacctgcatgctggcatgagcaccctgttcctggtgtacagcaacaagtgccagacccccctgggcatggcctctggccacatcagagacttccagatcacagcctcaggccagtatggccagtgggcccccaagctggccaggctgcactactctggcagcatcaatgcctggtccaccaaggagcccttcagctggatcaaggtggacctcctggcccccatgatcatccatggcatcaagacccagggggccaggcagaagttcagctccctgtacatctcccagttcatcatcatgtactccctggatggcaagaagtggcagacctacagaggcaacagcacaggcaccctgatggtgttctttggcaatgtggacagctctgggatcaagcacaacatcttcaacccccccatcattgccaggtacatcagactgcaccccacccactactccatcaggtccaccctgagaatggagctgatgggctgtgacctgaacagctgcagcatgcccctgggcatggagagcaaggccatctctgatgcccagatcacagccagcagctacttcaccaacatgtttgccacctggtcccccagcaaggccaggctgcacctgcagggcaggagcaatgcctggaggccccaggtgaacaaccccaaggagtggctgcaggtggacttccagaagaccatgaaggtgacaggggtgaccacccagggggtgaagtccctgctgaccagcatgtatgtgaaggagttcctgatcagcagctcccaggatggccaccagtggaccctgttcttccagaatggcaaggtgaaggtgttccagggcaaccaggacagcttcacccctgtggtgaactccctggacccccccctgctgaccagatacctgaggatccacccccagtcctgggtgcaccagattgccctgagaatggaggtgctgggctgtgaggcccaggacctgtactgattaattaagagcatcttaccgccatttattcccatatttgttctgtttttcttgatttgggtatacatttaaatgttaataaaacaaaatggtggggcaatcatttacatttttagggatatgtaattactagttcaggtgtattgccacaagacaaacatgttaagaaactttcccgttatttacgctctgttcctgttaatcaacctctggattacaaaatttgtgaaagattgactgatattcttaactatgttgctccttttacgctgtgtggatatgctgctttatagcctctgtatctagctattgcttcccgtacggctttcgttttctcctccttgtataaatcctggttgctgtctcttttagaggagttgtggcccgttgtccgtcaacgtggcgtggtgtgctctgtgtttgctgacgcaacccccactggctggggcattgccaccacctgtcaactcctttctgggactttcgctttccccctcccgatcgccacggcagaactcatcgccgcctgccttgcccgctgctggacaggggctaggttgctgggcactgataattccgtggtgttgtctgtgccttctagttgccagccatctgttgtttgcccctcccccgtgccttccttgaccctggaaggtgccactcccactgtcctttcctaataaaatgaggaaattgcatcgcattgtctgagtaggtgtcattctattctggggggtggggtggggcaggacagcaagggggaggattgggaagacaatagcaggcatgctggggatgcggtgggctctatggctctagagcatggctacgtagataagtagcatggcgggttaatcattaactacacctgcaggaggaacccctagtgatggagttggccactccctctctgcgcgctcgctcgctcactgaggccgggcgaccaaaggtcgcccgacgcccgggcggcctcagtgagcgagcgagcgcgcagctgcctgcagg

SEQ ID NO: 9 - DNA, 6007 bp, Artificial Sequence
  Description of Artificial Sequence: Synthetic polynucleotide
cctgcaggcagctgcgcgctcgctcgctcactgaggccgcccgggcaaagcccgggcgtcgggcgacctttggtcgcccggcctcagtgagcgagcgagcgcgcagagagggagtggccaactccatcactaggggttccttgtagttaatgattaacccgccatgctacttatctacgtagccatgctctagacgggggaggctgctggtgaatattaaccaaggtcaccccagttatcggaggagcaaacaggggctaagtccacacgcgtggtaccgtctgtctgcacatttcgtagagcgagtgttccgatactctaatctccctaggcaaggttcatatttgtgtaggttacttattctccttttgttgactaagtcaataatcagaatcagcaggtttggagtcagcttggcagggatcagcagcctgggttggaaggagggggtataaaagccccttcaccaggagaagccgtcacacagatccacaagctcctgaagaggtaagggtttaagggatggttggttggtggggtattaatgtttaattacctggagcacctgcctgaaatcactttttttcaggttggtttaaacgccgccaccatgcagattgagctgagcacctgcttcttcctgtgcctgctgaggttctgcttctctgccaccaggagatactacctgggggctgtggagctgagctgggactacatgcagtctgacctgggggagctgcctgtggatgccaggttcccccccagagtgcccaagagcttccccttcaacacctctgtggtgtacaagaagaccctgtttgtggagttcactgaccacctgttcaacattgccaagcccaggcccccctggatgggcctgctgggccccaccatccaggctgaggtgtatgacactgtggtgatcaccctgaagaacatggccagccaccctgtgagcctgcatgctgtgggggtgagctactggaaggcctctgagggggctgagtatgatgaccagaccagccagagggagaaggaggatgacaaggtgttccctgggggcagccacacctatgtgtggcaggtgctgaaggagaatggccccatggcctctgaccccctgtgcctgacctacagctacctgagccatgtggacctggtgaaggacctgaactctggcctgattggggccctgctggtgtgcagggagggcagcctggccaaggagaagacccagaccctgcacaagttcatcctgctgtttgctgtgtttgatgagggcaagagctggcactctgaaaccaagaacagcctgatgcaggacagggatgctgcctctgccagggcctggcccaagatgcacactgtgaatggctatgtgaacaggagcctgcctggcctgattggctgccacaggaagtctgtgtactggcatgtgattggcatgggcaccacccctgaggtgcacagcatcttcctggagggccacaccttcctggtcaggaaccacaggcaggccagcctggagatcagccccatcaccttcctgactgcccagaccctgctgatggacctgggccagttcctgctgagctgccacatcagcagccaccagcatgatggcatggaggcctatgtgaaggtggacagctgccctgaggagccccagctgaggatgaagaacaatgaggaggctgaggactatgatgatgacctgactgactctgagatggatgtggtgaggtttgatgatgacaacagccccagcttcatccagatcaggtctgtggccaagaagcaccccaagacctgggtgcactacattgctgctgaggaggaggactgggactatgcccccctggtgctggcccctgatgacaggagctacaagagccagtacctgaacaatggcccccagaggattggcaggaagtacaagaaggtcaggttcatggcctacactgatgaaaccttcaagaccagggaggccatccagcatgagtctggcatcctgggccccctgctgtatggggaggtgggggacaccctgctgatcatcttcaagaaccaggccagcaggccctacaacatctacccccatggcatcactgatgtgaggcccctgtacagcaggaggctgcccaagggggtgaagcacctgaaggacttccccatcctgcctggggagatcttcaagtacaagtggactgtgactgtggaggatggccccaccaagtctgaccccaggtgcctgaccagatactacagcagctttgtgaacatggagagggacctggcctctggcctgattggccccctgctgatctgctacaaggagtctgtggaccagaggggcaaccagatcatgtctgacaagaggaatgtgatcctgttctctgtgtttgatgagaacaggagctggtacctgactgagaacatccagaggttcctgcccaaccctgctggggtgcagctggaggaccctgagttccaggccagcaacatcatgcacagcatcaatggctatgtgtttgacagcctgcagctgtctgtgtgcctgcatgaggtggcctactggtacatcctgagcattggggcccagactgacttcctgtctgtgttcttctctggctacaccttcaagcacaagatggtgtatgaggacaccctgaccctgttccccttctctggggagactgtgttcatgagcatggagaaccctggcctgtggattctgggctgccacaactctgacttcaggaacaggggcatgactgccctgctgaaagtctccagctgtgacaagaacactggggactactatgaggacagctatgaggacatctctgcctacctgctgagcaagaacaatgccattgagcccaggagcttcagccagaatagcaggcaccccagcaccaggcagaagcagttcaatgccaccaccatcccagagaataccaccctgcagtctgaccaggaggagattgactatgatgacaccatctctgtggagatgaagaaggaggactttgacatctacgacgaggacgagaaccagagccccaggagcttccagaagaagaccaggcactacttcattgctgctgtggagaggctgtgggactatggcatgagcagcagcccccatgtgctgaggaacagggcccagtctggctctgtgccccagttcaagaaggtggtgttccaggagttcactgatggcagcttcacccagcccctgtacagaggggagctgaatgagcacctgggcctgctgggcccctacatcagggctgaggtggaggacaacatcatggtgaccttcaggaaccaggccagcaggccctacagcttctacagcagcctgatcagctatgaggaggaccagaggcagggggctgagcccaggaagaactttgtgaagcccaatgaaaccaagacctacttctggaaggtgcagcaccacatggcccccaccaaggatgagtttgactgcaaggcctgggcctacttctctgatgtggacctggagaaggatgtgcactctggcctgattggccccctgctggtgtgccacaccaacaccctgaaccctgcccatggcaggcaggtgactgtgcaggagtttgccctgttcttcaccatctttgatgaaaccaagagctggtacttcactgagaacatggagaggaactgcagggccccctgcaacatccagatggaggaccccaccttcaaggagaactacaggttccatgccatcaatggctacatcatggacaccctgcctggcctggtgatggcccaggaccagaggatcaggtggtacctgctgagcatgggcagcaatgagaacatccacagcatccacttctctggccatgtgttcactgtgaggaagaaggaggagtacaagatggccctgtacaacctgtaccctggggtgtttgagactgtggagatgctgcccagcaaggctggcatctggagggtggagtgcctgattggggagcacctgcatgctggcatgagcaccctgttcctggtgtacagcaacaagtgccagacccccctgggcatggcctctggccacatcagggacttccagatcactgcctctggccagtatggccagtgggcccccaagctggccaggctgcactactctggcagcatcaatgcctggagcaccaaggagcccttcagctggatcaaggtggacctgctggcccccatgatcatccatggcatcaagacccagggggccaggcagaagttcagcagcctgtacatcagccagttcatcatcatgtacagcctggatggcaagaagtggcagacctacaggggcaacagcactggcaccctgatggtgttctttggcaatgtggacagctctggcatcaagcacaacatcttcaacccccccatcattgccagatacatcaggctgcaccccacccactacagcatcaggagcaccctgaggatggagctgatgggctgtgacctgaacagctgcagcatgcccctgggcatggagagcaaggccatctctgatgcccagatcactgccagcagctacttcaccaacatgtttgccacctggagccccagcaaggccaggctgcacctgcagggcaggagcaatgcctggaggccccaggtcaacaaccccaaggagtggctgcaggtggacttccagaagaccatgaaggtgactggggtgaccacccagggggtgaagagcctgctgaccagcatgtatgtgaaggagttcctgatcagcagcagccaggatggccaccagtggaccctgttcttccagaatggcaaggtgaaggtgttccagggcaaccaggacagcttcacccctgtggtgaacagcctggacccccccctgctgaccagatacctgaggattcacccccagagctgggtgcaccagattgccctgaggatggaggtgctgggctgtgaggcccaggacctgtactgattaattaagagcatcttaccgccatttattcccatatttgttctgtttttcttgatttgggtatacatttaaatgttaataaaacaaaatggtggggcaatcatttacatttttagggatatgtaattactagttcaggtgtattgccacaagacaaacatgttaagaaactttcccgttatttacgctctgttcctgttaatcaacctctggattacaaaatttgtgaaagattgactgatattcttaactatgttgctccttttacgctgtgtggatatgctgctttatagcctctgtatctagctattgcttcccgtacggctttcgttttctcctccttgtataaatcctggttgctgtctcttttagaggagttgtggcccgttgtccgtcaacgtggcgtggtgtgctctgtgtttgctgacgcaacccccactggctggggcattgccaccacctgtcaactcctttctgggactttcgctttccccctcccgatcgccacggcagaactcatcgccgcctgccttgcccgctgctggacaggggctaggttgctgggcactgataattccgtggtgttgtctgtgccttctagttgccagccatctgttgtttgcccctcccccgtgccttccttgaccctggaaggtgccactcccactgtcctttcctaataaaatgaggaaattgcatcgcattgtctgagtaggtgtcattctattctggggggtggggtggggcaggacagcaagggggaggattgggaagacaatagcaggcatgctggggatgcggtgggctctatggctctagagcatggctacgtagataagtagcatggcgggttaatcattaactacacctgcaggaggaacccctagtgatggagttggccactccctctctgcgcgctcgctcgctcactgaggccgggcgaccaaaggtcgcccgacgcccgggcggcctcagtgagcgagcgagcgcgcagctgcctgcagg

SEQ ID NO: 10 - DNA, 6007 bp, Artificial Sequence
  Description of Artificial Sequence: Synthetic polynucleotide
cctgcaggcagctgcgcgctcgctcgctcactgaggccgcccgggcaaagcccgggcgtcgggcgacctttggtcgcccggcctcagtgagcgagcgagcgcgcagagagggagtggccaactccatcactaggggttccttgtagttaatgattaacccgccatgctacttatctacgtagccatgctctagacgggggaggctgctggtgaatattaaccaaggtcaccccagttatcggaggagcaaacaggggctaagtccacacgcgtggtaccgtctgtctgcacatttcgtagagcgagtgttccgatactctaatctccctaggcaaggttcatatttgtgtaggttacttattctccttttgttgactaagtcaataatcagaatcagcaggtttggagtcagcttggcagggatcagcagcctgggttggaaggagggggtataaaagccccttcaccaggagaagccgtcacacagatccacaagctcctgaagaggtaagggtttaagggatggttggttggtggggtattaatgtttaattacctggagcacctgcctgaaatcactttttttcaggttggtttaaacgccgccaccatgcagattgagctgagcacctgcttcttcctgtgcctgctgaggttctgcttctctgccaccaggagatactacctgggggctgtggagctgagctgggactacatgcagtctgacctgggggagctgcctgtggatgccaggttcccccccagagtgcccaagagcttccccttcaacacctctgtggtgtacaagaagaccctgtttgtggagttcactgaccacctgttcaacattgccaagcccaggcccccctggatgggcctgctgggccccaccatccaggctgaggtgtatgacactgtggtgatcaccctgaagaacatggccagccaccctgtgagcctgcatgctgtgggggtgagctactggaaggcctctgagggggctgagtatgatgaccagaccagccagagggagaaggaggatgacaaggtgttccctgggggcagccacacctatgtgtggcaggtgctgaaggagaatggccccatggcctctgaccccctgtgcctgacctacagctacctgagccatgtggacctggtgaaggacctgaactctggcctgattggggccctgctggtgtgcagggagggcagcctggccaaggagaagacccagaccctgcacaagttcatcctgctgtttgctgtgtttgatgagggcaagagctggcactctgaaaccaagaacagcctgatgcaggacagggatgctgcctctgccagggcctggcccaagatgcacactgtgaatggctatgtgaacaggagcctgcctggcctgattggctgccacaggaagtctgtgtactggcatgtgattggcatgggcaccacccctgaggtgcacagcatcttcctggagggccacaccttcctggtcaggaaccacaggcaggccagcctggagatcagccccatcaccttcctgactgcccagaccctgctgatggacctgggccagttcctgctgttctgccacatcagcagccaccagcatgatggcatggaggcctatgtgaaggtggacagctgccctgaggagccccagctgaggatgaagaacaatgaggaggctgaggactatgatgatgacctgactgactctgagatggatgtggtgaggtttgatgatgacaacagccccagcttcatccagatcaggtctgtggccaagaagcaccccaagacctgggtgcactacattgctgctgaggaggaggactgggactatgcccccctggtgctggcccctgatgacaggagctacaagagccagtacctgaacaatggcccccagaggattggcaggaagtacaagaaggtcaggttcatggcctacactgatgaaaccttcaagaccagggaggccatccagcatgagtctggcatcctgggccccctgctgtatggggaggtgggggacaccctgctgatcatcttcaagaaccaggccagcaggccctacaacatctacccccatggcatcactgatgtgaggcccctgtacagcaggaggctgcccaagggggtgaagcacctgaaggacttccccatcctgcctggggagatcttcaagtacaagtggactgtgactgtggaggatggccccaccaagtctgaccccaggtgcctgaccagatactacagcagctttgtgaacatggagagggacctggcctctggcctgattggccccctgctgatctgctacaaggagtctgtggaccagaggggcaaccagatcatgtctgacaagaggaatgtgatcctgttctctgtgtttgatgagaacaggagctggtacctgactgagaacatccagaggttcctgcccaaccctgctggggtgcagctggaggaccctgagttccaggccagcaacatcatgcacagcatcaatggctatgtgtttgacagcctgcagctgtctgtgtgcctgcatgaggtggcctactggtacatcctgagcattggggcccagactgacttcctgtctgtgttcttctctggctacaccttcaagcacaagatggtgtatgaggacaccctgaccctgttccccttctctggggagactgtgttcatgagcatggagaaccctggcctgtggattctgggctgccacaactctgacttcaggaacaggggcatgactgccctgctgaaagtctccagctgtgacaagaacactggggactactatgaggacagctatgaggacatctctgcctacctgctgagcaagaacaatgccattgagcccaggagcttcagccagaatagcaggcaccccagcaccaggcagaagcagttcaatgccaccaccatcccagagaataccaccctgcagtctgaccaggaggagattgactatgatgacaccatctctgtggagatgaagaaggaggactttgacatctacgacgaggacgagaaccagagccccaggagcttccagaagaagaccaggcactacttcattgctgctgtggagaggctgtgggactatggcatgagcagcagcccccatgtgctgaggaacagggcccagtctggctctgtgccccagttcaagaaggtggtgttccaggagttcactgatggcagcttcacccagcccctgtacagaggggagctgaatgagcacctgggcctgctgggcccctacatcagggctgaggtggaggacaacatcatggtgaccttcaggaaccaggccagcaggccctacagcttctacagcagcctgatcagctatgaggaggaccagaggcagggggctgagcccaggaagaactttgtgaagcccaatgaaaccaagacctacttctggaaggtgcagcaccacatggcccccaccaaggatgagtttgactgcaaggcctgggcctacttctctgatgtggacctggagaaggatgtgcactctggcctgattggccccctgctggtgtgccacaccaacaccctgaaccctgcccatggcaggcaggtgactgtgcaggagtttgccctgttcttcaccatctttgatgaaaccaagagctggtacttcactgagaacatggagaggaactgcagggccccctgcaacatccagatggaggaccccaccttcaaggagaactacaggttccatgccatcaatggctacatcatggacaccctgcctggcctggtgatggcccaggaccagaggatcaggtggtacctgctgagcatgggcagcaatgagaacatccacagcatccacttctctggccatgtgttcactgtgaggaagaaggaggagtacaagatggccctgtacaacctgtaccctggggtgtttgagactgtggagatgctgcccagcaaggctggcatctggagggtggagtgcctgattggggagcacctgcatgctggcatgagcaccctgttcctggtgtacagcaacaagtgccagacccccctgggcatggcctctggccacatcagggacttccagatcactgcctctggccagtatggccagtgggcccccaagctggccaggctgcactactctggcagcatcaatgcctggagcaccaaggagcccttcagctggatcaaggtggacctgctggcccccatgatcatccatggcatcaagacccagggggccaggcagaagttcagcagcctgtacatcagccagttcatcatcatgtacagcctggatggcaagaagtggcagacctacaggggcaacagcactggcaccctgatggtgttctttggcaatgtggacagctctggcatcaagcacaacatcttcaacccccccatcattgccagatacatcaggctgcaccccacccactacagcatcaggagcaccctgaggatggagctgatgggctgtgacctgaacagctgcagcatgcccctgggcatggagagcaaggccatctctgatgcccagatcactgccagcagctacttcaccaacatgtttgccacctggagccccagcaaggccaggctgcacctgcagggcaggagcaatgcctggaggccccaggtcaacaaccccaaggagtggctgcaggtggacttccagaagaccatgaaggtgactggggtgaccacccagggggtgaagagcctgctgaccagcatgtatgtgaaggagttcctgatcagcagcagccaggatggccaccagtggaccctgttcttccagaatggcaaggtgaaggtgttccagggcaaccaggacagcttcacccctgtggtgaacagcctggacccccccctgctgaccagatacctgaggattcacccccagagctgggtgcaccagattgccctgaggatggaggtgctgggctgtgaggcccaggacctgtactgattaattaagagcatcttaccgccatttattcccatatttgttctgtttttcttgatttgggtatacatttaaatgttaataaaacaaaatggtggggcaatcatttacatttttagggatatgtaattactagttcaggtgtattgccacaagacaaacatgttaagaaactttcccgttatttacgctctgttcctgttaatcaacctctggattacaaaatttgtgaaagattgactgatattcttaactatgttgctccttttacgctgtgtggatatgctgctttatagcctctgtatctagctattgcttcccgtacggctttcgttttctcctccttgtataaatcctggttgctgtctcttttagaggagttgtggcccgttgtccgtcaacgtggcgtggtgtgctctgtgtttgctgacgcaacccccactggctggggcattgccaccacctgtcaactcctttctgggactttcgctttccccctcccgatcgccacggcagaactcatcgccgcctgccttgcccgctgctggacaggggctaggttgctgggcactgataattccgtggtgttgtctgtgccttctagttgccagccatctgttgtttgcccctcccccgtgccttccttgaccctggaaggtgccactcccactgtcctttcctaataaaatgaggaaattgcatcgcattgtctgagtaggtgtcattctattctggggggtggggtggggcaggacagcaagggggaggattgggaagacaatagcaggcatgctggggatgcggtgggctctatggctctagagcatggctacgtagataagtagcatggcgggttaatcattaactacacctgcaggaggaacccctagtgatggagttggccactccctctctgcgcgctcgctcgctcactgaggccgggcgaccaaaggtcgcccgacgcccgggcggcctcagtgagcgagcgagcgcgcagctgcctgcagg

SEQ ID NO: 11 - DNA, 6208 bp, Artificial Sequence
  Description of Artificial Sequence: Synthetic polynucleotide
cctgcaggcagctgcgcgctcgctcgctcactgaggccgcccgggcaaagcccgggcgtcgggcgacctttggtcgcccggcctcagtgagcgagcgagcgcgcagagagggagtggccaactccatcactaggggttccttgtagttaatgattaacccgccatgctacttatcgcggccgccggtacgcgggggaggctgctggtgaatattaaccaaggtcaccccagttatcggaggagcaaacaggggctaagtccaccgggggaggctgctggtgaatattaaccaaggtcaccccagttatcggaggagcaaacaggggctaagtccaccgggggaggctgctggtgaatattaaccaaggtcaccccagttatcggaggagcaaacaggggctaagtccactgtacaacgcgtgaattcgctagcgtctgtctgcacatttcgtagagcgagtgttccgatactctaatctccctaggcaaggttcatatttgtgtaggttacttattctccttttgttgactaagtcaataatcagaatcagcaggtttggagtcagcttggcagggatcagcagcctgggttggaaggagggggtataaaagccccttcaccaggagaagccgtcacacagatccacaagctcctgtctagaaagaggtaagggtttaagggatggttggttggtggggtattaatgtttaattacctggagcacctgcctgaaatcactttttttcaggttgggtttaaacgccgccaccatgcaaattgagttatccacctgtttcttcctctgtctcctgaggttctgcttctctgccaccaggagatactacctgggggctgtggagctgtcctgggactacatgcagtcagacctgggggagctgccagttgatgccaggttcccccccagagtccccaagtccttccccttcaacacctcagtggtgtacaaaaagaccctgtttgtggagttcacagaccacctgttcaacatagccaagcccaggcccccctggatgggcctgctgggccccaccatccaggcagaggtttatgacacagtggtcatcaccctgaagaacatggcctcccaccctgtgtccctccatgctgtgggggtgagctactggaaggccagtgagggggcagaatatgatgaccagaccagccagagggagaaggaggatgacaaggtgttcccagggggcagccacacctatgtgtggcaggtcctgaaggagaatggccccatggcctctgaccccctctgcctcacctactcctacctgtcccatgtggacctggtgaaggacctcaactctggcctgattggagccctcctggtgtgcagggaggggagcctggccaaggaaaagacccagaccctgcacaagtttatcctgctctttgcagtctttgatgaggggaagtcctggcacagtgagaccaagaactccctgatgcaggacagagatgctgcctcagccagggcctggcccaagatgcacacagtgaatgggtatgtcaacaggagcctgccaggcctgattgggtgccacagaaagtcagtgtactggcatgtcattggcatgggcaccaccccagaggtgcactccatcttcctggagggccacaccttcctggtgaggaaccacagacaggccagcctggagatcagcccaatcaccttcctcacagcccagaccctcctcatggacctgggccagtttctcctgagctgccacatctcctcccaccagcatgatggcatggaggcctatgtgaaggtggacagctgccctgaggagccccagctcaggatgaagaacaatgaggaggcagaggactatgatgatgatctgacagactctgagatggatgtggtgagatttgatgatgacaacagcccctccttcatccagatcaggtctgtggccaagaagcaccctaagacctgggtgcactacattgcagctgaggaggaggactgggactatgcccccctggtcctggcccctgatgataggtcctacaagtcccagtacctgaacaatggcccccagaggatagggagaaagtacaagaaggtgaggttcatggcctacactgatgagaccttcaagactagggaagccatccagcatgagtctgggatcctgggccccctcctctatggggaggtgggggacaccctgctgatcatcttcaagaaccaggccagcaggccctacaacatttacccccatgggatcacagatgtgagacccctgtacagcaggagactgccaaagggggtgaagcacctgaaggacttccccatcctgccaggggagatcttcaagtacaagtggactgtgacagtggaggatgggcccaccaaatctgaccctagatgcctgaccagatactacagcagctttgtgaacatggagagggacctggcctctggactgattggccctctgctgatctgctacaaggagagtgtggaccagaggggaaaccagatcatgtctgacaagaggaatgtgatcctgttctcagtgtttgatgagaacagatcctggtacctcactgagaacatccagaggttcctgcccaacccagcaggggtgcagctggaggacccagagttccaggcctccaacatcatgcactccatcaatggctatgtctttgactccctgcagctgtcagtgtgcctgcatgaggtggcctactggtacatcctctccattggagcccagactgacttcctgtcagtcttcttcagtggctacaccttcaagcacaagatggtctatgaggacactctgaccctgttccccttctctggggagactgtgttcatgtccatggagaaccctggactgtggatcctgggctgccacaacagtgacttcaggaacaggggcatgactgccctgctgaaggtctccagctgtgacaagaacactggggactactatgaggactcctatgaggacatctctgcctacctgctgtccaagaacaatgccattgagcccaggtccttctcccagaacagcagacacccctccaccaggcagaagcagttcaatgcaaccaccatccctgaaaatgatattgagaagacagacccctggtttgctcacaggacccccatgcccaagatccagaatgtgagctcctctgacctgctgatgctgctgaggcagtctcctaccccccatgggctgtccctgagtgacctgcaggaggccaagtatgagaccttctcagatgaccccagcccaggagccattgattccaacaacagcctgtcagagatgacccacttcaggccccagctgcaccactctggggacatggtgttcacccctgagtctgggctgcagctgaggctgaatgagaagctgggcaccactgcagccacagagctcaagaagctggactttaaggtgagctccaccagcaacaacctgatcagcacaatccctagtgacaatctggctgctggcacagacaacacctcctccctgggcccccccagcatgcctgtgcactatgactcccagctggacaccaccctgtttgggaagaagtccagccccctgacagagtcagggggccccctgtccctctctgaggagaacaatgacagtaagctgctggagagtgggctgatgaactcccaggagtcctcctggggaaagaatgtctccagcagggagatcaccaggaccaccctgcagagtgaccaggaggagattgactatgatgacaccatctctgtggagatgaagaaggaggactttgacatctatgatgaggatgagaaccagagccctagaagcttccagaagaagaccagacactacttcattgctgcagtggaaagactgtgggactatgggatgagctcctccccccatgtgctgaggaacagggcccagtctggctctgtgccccagttcaagaaggtggtgttccaggagttcactgatggctccttcacccagcccctgtacaggggagagctgaatgagcacctgggcctgctgggcccctacatcagggctgaggtggaggacaatatcatggtgaccttcagaaaccaggcctccagaccttactccttctacagcagcctgatctcctatgaggaggaccagagacagggggctgagcccaggaagaactttgtgaagcccaatgagaccaagacctacttctggaaggtgcagcaccacatggcccccaccaaggatgagtttgactgcaaggcctgggcctacttctctgatgtggacctggagaaggatgtgcactctggcctgattggccccctgctggtgtgccacaccaacaccctgaaccctgcccatggcaggcaggtgactgtgcaggagtttgccctgttcttcaccatctttgatgagaccaagagctggtacttcactgagaacatggagaggaactgcagggccccctgcaacatccagatggaggaccccaccttcaaggagaactacaggttccatgccatcaatggctacatcatggacaccctgcctggcctggtgatggcccaggaccagaggatcaggtggtacctgctgagcatggggagcaatgagaacatccacagcatccacttctctggccatgtgttcacagtgaggaagaaggaggagtacaagatggccctgtacaacctgtaccctggggtgtttgagacagtggagatgctgccctccaaggctggaatctggagggtggagtgcctgattggggagcacctgcatgctggcatgagcaccctgttcctggtgtacagcaacaagtgccagacccccctgggcatggcctctggccacatcagagacttccagatcacagcctcaggccagtatggccagtgggcccccaagctggccaggctgcactactctggcagcatcaatgcctggtccaccaaggagcccttcagctggatcaaggtggacctcctggcccccatgatcatccatggcatcaagacccagggggccaggcagaagttcagctccctgtacatctcccagttcatcatcatgtactccctggatggcaagaagtggcagacctacagaggcaacagcacaggcaccctgatggtgttctttggcaatgtggacagctctgggatcaagcacaacatcttcaacccccccatcattgccaggtacatcagactgcaccccacccactactccatcaggtccaccctgagaatggagctgatgggctgtgacctgaacagctgcagcatgcccctgggcatggagagcaaggccatctctgatgcccagatcacagccagcagctacttcaccaacatgtttgccacctggtcccccagcaaggccaggctgcacctgcagggcaggagcaatgcctggaggccccaggtgaacaaccccaaggagtggctgcaggtggacttccagaagaccatgaaggtgacaggggtgaccacccagggggtgaagtccctgctgaccagcatgtatgtgaaggagttcctgatcagcagctcccaggatggccaccagtggaccctgttcttccagaatggcaaggtgaaggtgttccagggcaaccaggacagcttcacccctgtggtgaactccctggacccccccctgctgaccagatacctgaggatccacccccagtcctgggtgcaccagattgccctgagaatggaggtgctgggctgtgaggcccaggacctgtactgattaattaatgtgccttctagttgccagccatctgttgtttgcccctcccccgtgccttccttgaccctggaaggtgccactcccactgtcctttcctaataaaatgaggaaattgcatcgcattgtctgagtaggtgtcattctattctggggggtggggtggggcaggacagcaagggggaggattgggaagacaatagcaggcatgctggggatgcggtgggctctatggctctagagcatggctacgtagataagtagcatggcgggttaatcattaactacacctgcaggaggaacccctagtgatggagttggccactccctctctgcgcgctcgctcgctcactgaggccgggcgaccaaaggtcgcccgacgcccgggcggcctcagtgagcgagcgagcgcgcagctgcctgcagg

SEQ ID NO: 12 - DNA, 6378 bp, Artificial Sequence
  Description of Artificial Sequence: Synthetic polynucleotide
cctgcaggcagctgcgcgctcgctcgctcactgaggccgcccgggcaaagcccgggcgtcgggcgacctttggtcgcccggcctcagtgagcgagcgagcgcgcagagagggagtggccaactccatcactaggggttccttgtagttaatgattaacccgccatgctacttatcgcggccgccggtacgcgggggaggctgctggtgaatattaaccaaggtcaccccagttatcggaggagcaaacaggggctaagtccaccgggggaggctgctggtgaatattaaccaaggtcaccccagttatcggaggagcaaacaggggctaagtccaccgggggaggctgctggtgaatattaaccaaggtcaccccagttatcggaggagcaaacaggggctaagtccactgtacaacgcgtgaattcgctagcgtctgtctgcacatttcgtagagcgagtgttccgatactctaatctccctaggcaaggttcatatttgtgtaggttacttattctccttttgttgactaagtcaataatcagaatcagcaggtttggagtcagcttggcagggatcagcagcctgggttggaaggagggggtataaaagccccttcaccaggagaagccgtcacacagatccacaagctcctgtctagaaagaggtaagggtttaagggatggttggttggtggggtattaatgtttaattacctggagcacctgcctgaaatcactttttttcaggttgggtttaaacgccgccaccatgcaaattgagttatccacctgtttcttcctctgtctcctgaggttctgcttctctgccaccaggagatactacctgggggctgtggagctgtcctgggactacatgcagtcagacctgggggagctgccagttgatgccaggttcccccccagagtccccaagtccttccccttcaacacctcagtggtgtacaaaaagaccctgtttgtggagttcacagaccacctgttcaacatagccaagcccaggcccccctggatgggcctgctgggccccaccatccaggcagaggtttatgacacagtggtcatcaccctgaagaacatggcctcccaccctgtgtccctccatgctgtgggggtgagctactggaaggccagtgagggggcagaatatgatgaccagaccagccagagggagaaggaggatgacaaggtgttcccagggggcagccacacctatgtgtggcaggtcctgaaggagaatggccccatggcctctgaccccctctgcctcacctactcctacctgtcccatgtggacctggtgaaggacctcaactctggcctgattggagccctcctggtgtgcagggaggggagcctggccaaggaaaagacccagaccctgcacaagtttatcctgctctttgcagtctttgatgaggggaagtcctggcacagtgagaccaagaactccctgatgcaggacagagatgctgcctcagccagggcctggcccaagatgcacacagtgaatgggtatgtcaacaggagcctgccaggcctgattgggtgccacagaaagtcagtgtactggcatgtcattggcatgggcaccaccccagaggtgcactccatcttcctggagggccacaccttcctggtgaggaaccacagacaggccagcctggagatcagcccaatcaccttcctcacagcccagaccctcctcatggacctgggccagtttctcctgagctgccacatctcctcccaccagcatgatggcatggaggcctatgtgaaggtggacagctgccctgaggagccccagctcaggatgaagaacaatgaggaggcagaggactatgatgatgatctgacagactctgagatggatgtggtgagatttgatgatgacaacagcccctccttcatccagatcaggtctgtggccaagaagcaccctaagacctgggtgcactacattgcagctgaggaggaggactgggactatgcccccctggtcctggcccctgatgataggtcctacaagtcccagtacctgaacaatggcccccagaggatagggagaaagtacaagaaggtgaggttcatggcctacactgatgagaccttcaagactagggaagccatccagcatgagtctgggatcctgggccccctcctctatggggaggtgggggacaccctgctgatcatcttcaagaaccaggccagcaggccctacaacatttacccccatgggatcacagatgtgagacccctgtacagcaggagactgccaaagggggtgaagcacctgaaggacttccccatcctgccaggggagatcttcaagtacaagtggactgtgacagtggaggatgggcccaccaaatctgaccctagatgcctgaccagatactacagcagctttgtgaacatggagagggacctggcctctggactgattggccctctgctgatctgctacaaggagagtgtggaccagaggggaaaccagatcatgtctgacaagaggaatgtgatcctgttctcagtgtttgatgagaacagatcctggtacctcactgagaacatccagaggttcctgcccaacccagcaggggtgcagctggaggacccagagttccaggcctccaacatcatgcactccatcaatggctatgtctttgactccctgcagctgtcagtgtgcctgcatgaggtggcctactggtacatcctctccattggagcccagactgacttcctgtcagtcttcttcagtggctacaccttcaagcacaagatggtctatgaggacactctgaccctgttccccttctctggggagactgtgttcatgtccatggagaaccctggactgtggatcctgggctgccacaacagtgacttcaggaacaggggcatgactgccctgctgaaggtctccagctgtgacaagaacactggggactactatgaggactcctatgaggacatctctgcctacctgctgtccaagaacaatgccattgagcccaggtccttctcccagaacagcagacacccctccaccaggcagaagcagttcaatgcaaccaccatccctgaaaatgatattgagaagacagacccctggtttgctcacaggacccccatgcccaagatccagaatgtgagctcctctgacctgctgatgctgctgaggcagtctcctaccccccatgggctgtccctgagtgacctgcaggaggccaagtatgagaccttctcagatgaccccagcccaggagccattgattccaacaacagcctgtcagagatgacccacttcaggccccagctgcaccactctggggacatggtgttcacccctgagtctgggctgcagctgaggctgaatgagaagctgggcaccactgcagccacagagctcaagaagctggactttaaggtgagctccaccagcaacaacctgatcagcacaatccctagtgacaatctggctgctggcacagacaacacctcctccctgggcccccccagcatgcctgtgcactatgactcccagctggacaccaccctgtttgggaagaagtccagccccctgacagagtcagggggccccctgtccctctctgaggagaacaatgacagtaagctgctggagagtgggctgatgaactcccaggagtcctcctggggaaagaatgtctccagcagggagatcaccaggaccaccctgcagagtgaccaggaggagattgactatgatgacaccatctctgtggagatgaagaaggaggactttgacatctatgatgaggatgagaaccagagccctagaagcttccagaagaagaccagacactacttcattgctgcagtggaaagactgtgggactatgggatgagctcctccccccatgtgctgaggaacagggcccagtctggctctgtgccccagttcaagaaggtggtgttccaggagttcactgatggctccttcacccagcccctgtacaggggagagctgaatgagcacctgggcctgctgggcccctacatcagggctgaggtggaggacaatatcatggtgaccttcagaaaccaggcctccagaccttactccttctacagcagcctgatctcctatgaggaggaccagagacagggggctgagcccaggaagaactttgtgaagcccaatgagaccaagacctacttctggaaggtgcagcaccacatggcccccaccaaggatgagtttgactgcaaggcctgggcctacttctctgatgtggacctggagaaggatgtgcactctggcctgattggccccctgctggtgtgccacaccaacaccctgaaccctgcccatggcaggcaggtgactgtgcaggagtttgccctgttcttcaccatctttgatgagaccaagagctggtacttcactgagaacatggagaggaactgcagggccccctgcaacatccagatggaggaccccaccttcaaggagaactacaggttccatgccatcaatggctacatcatggacaccctgcctggcctggtgatggcccaggaccagaggatcaggtggtacctgctgagcatggggagcaatgagaacatccacagcatccacttctctggccatgtgttcacagtgaggaagaaggaggagtacaagatggccctgtacaacctgtaccctggggtgtttgagacagtggagatgctgccctccaaggctggaatctggagggtggagtgcctgattggggagcacctgcatgctggcatgagcaccctgttcctggtgtacagcaacaagtgccagacccccctgggcatggcctctggccacatcagagacttccagatcacagcctcaggccagtatggccagtgggcccccaagctggccaggctgcactactctggcagcatcaatgcctggtccaccaaggagcccttcagctggatcaaggtggacctcctggcccccatgatcatccatggcatcaagacccagggggccaggcagaagttcagctccctgtacatctcccagttcatcatcatgtactccctggatggcaagaagtggcagacctacagaggcaacagcacaggcaccctgatggtgttctttggcaatgtggacagctctgggatcaagcacaacatcttcaacccccccatcattgccaggtacatcagactgcaccccacccactactccatcaggtccaccctgagaatggagctgatgggctgtgacctgaacagctgcagcatgcccctgggcatggagagcaaggccatctctgatgcccagatcacagccagcagctacttcaccaacatgtttgccacctggtcccccagcaaggccaggctgcacctgcagggcaggagcaatgcctggaggccccaggtgaacaaccccaaggagtggctgcaggtggacttccagaagaccatgaaggtgacaggggtgaccacccagggggtgaagtccctgctgaccagcatgtatgtgaaggagttcctgatcagcagctcccaggatggccaccagtggaccctgttcttccagaatggcaaggtgaaggtgttccagggcaaccaggacagcttcacccctgtggtgaactccctggacccccccctgctgaccagatacctgaggatccacccccagtcctgggtgcaccagattgccctgagaatggaggtgctgggctgtgaggcccaggacctgtactgattaattaagctcgctttcttgctgtccaatttctattaaaggttcctttgttccctaagtccaactactaaactgggggatattatgaagggccttgagcatctggattctgcctaataaaaaacatttattttcattgcaatgatgtatttaaattatttctgaatattttactaaaaagggaatgtgggaggtcagtgcatttaaaacataaagaaatgaagagctagttcaaaccttgggaaaatacactatatcttaaactccatgaaagaaggtgaggctgcaaacagctaatgcacattggcaacagcccctgatgcctatgccttattcatccctcagaaaaggattcaagtagaggcttgatttggaggttaaagttttgctatgctgtattttatctagagcatggctacgtagataagtagcatggcgggttaatcattaactacacctgcaggaggaacccctagtgatggagttggccactccctctctgcgcgctcgctcgctcactgaggccgggcgaccaaaggtcgcccgacgcccgggcggcctcagtgagcgagcgagcgcgcagctgcctgcagg

SEQ ID NO: 13 - DNA, 6603 bp, Artificial Sequence
  Description of Artificial Sequence: Synthetic polynucleotide
cctgcaggcagctgcgcgctcgctcgctcactgaggccgcccgggcaaagcccgggcgtcgggcgacctttggtcgcccggcctcagtgagcgagcgagcgcgcagagagggagtggccaactccatcactaggggttccttgtagttaatgattaacccgccatgctacttatcgcggccgccggtacgcgggggaggctgctggtgaatattaaccaaggtcaccccagttatcggaggagcaaacaggggctaagtccaccgggggaggctgctggtgaatattaaccaaggtcaccccagttatcggaggagcaaacaggggctaagtccaccgggggaggctgctggtgaatattaaccaaggtcaccccagttatcggaggagcaaacaggggctaagtccactgtacaacgcgtgaattcgctagcgtctgtctgcacatttcgtagagcgagtgttccgatactctaatctccctaggcaaggttcatatttgtgtaggttacttattctccttttgttgactaagtcaataatcagaatcagcaggtttggagtcagcttggcagggatcagcagcctgggttggaaggagggggtataaaagccccttcaccaggagaagccgtcacacagatccacaagctcctgtctagaaagaggtaagggtttaagggatggttggttggtggggtattaatgtttaattacctggagcacctgcctgaaatcactttttttcaggttgggtttaaacgccgccaccatgcaaattgagttatccacctgtttcttcctctgtctcctgaggttctgcttctctgccaccaggagatactacctgggggctgtggagctgtcctgggactacatgcagtcagacctgggggagctgccagttgatgccaggttcccccccagagtccccaagtccttccccttcaacacctcagtggtgtacaaaaagaccctgtttgtggagttcacagaccacctgttcaacatagccaagcccaggcccccctggatgggcctgctgggccccaccatccaggcagaggtttatgacacagtggtcatcaccctgaagaacatggcctcccaccctgtgtccctccatgctgtgggggtgagctactggaaggccagtgagggggcagaatatgatgaccagaccagccagagggagaaggaggatgacaaggtgttcccagggggcagccacacctatgtgtggcaggtcctgaaggagaatggccccatggcctctgaccccctctgcctcacctactcctacctgtcccatgtggacctggtgaaggacctcaactctggcctgattggagccctcctggtgtgcagggaggggagcctggccaaggaaaagacccagaccctgcacaagtttatcctgctctttgcagtctttgatgaggggaagtcctggcacagtgagaccaagaactccctgatgcaggacagagatgctgcctcagccagggcctggcccaagatgcacacagtgaatgggtatgtcaacaggagcctgccaggcctgattgggtgccacagaaagtcagtgtactggcatgtcattggcatgggcaccaccccagaggtgcactccatcttcctggagggccacaccttcctggtgaggaaccacagacaggccagcctggagatcagcccaatcaccttcctcacagcccagaccctcctcatggacctgggccagtttctcctgagctgccacatctcctcccaccagcatgatggcatggaggcctatgtgaaggtggacagctgccctgaggagccccagctcaggatgaagaacaatgaggaggcagaggactatgatgatgatctgacagactctgagatggatgtggtgagatttgatgatgacaacagcccctccttcatccagatcaggtctgtggccaagaagcaccctaagacctgggtgcactacattgcagctgaggaggaggactgggactatgcccccctggtcctggcccctgatgataggtcctacaagtcccagtacctgaacaatggcccccagaggatagggagaaagtacaagaaggtgaggttcatggcctacactgatgagaccttcaagactagggaagccatccagcatgagtctgggatcctgggccccctcctctatggggaggtgggggacaccctgctgatcatcttcaagaaccaggccagcaggccctacaacatttacccccatgggatcacagatgtgagacccctgtacagcaggagactgccaaagggggtgaagcacctgaaggacttccccatcctgccaggggagatcttcaagtacaagtggactgtgacagtggaggatgggcccaccaaatctgaccctagatgcctgaccagatactacagcagctttgtgaacatggagagggacctggcctctggactgattggccctctgctgatctgctacaaggagagtgtggaccagaggggaaaccagatcatgtctgacaagaggaatgtgatcctgttctcagtgtttgatgagaacagatcctggtacctcactgagaacatccagaggttcctgcccaacccagcaggggtgcagctggaggacccagagttccaggcctccaacatcatgcactccatcaatggctatgtctttgactccctgcagctgtcagtgtgcctgcatgaggtggcctactggtacatcctctccattggagcccagactgacttcctgtcagtcttcttcagtggctacaccttcaagcacaagatggtctatgaggacactctgaccctgttccccttctctggggagactgtgttcatgtccatggagaaccctggactgtggatcctgggctgccacaacagtgacttcaggaacaggggcatgactgccctgctgaaggtctccagctgtgacaagaacactggggactactatgaggactcctatgaggacatctctgcctacctgctgtccaagaacaatgccattgagcccaggtccttctcccagaacagcagacacccctccaccaggcagaagcagttcaatgcaaccaccatccctgaaaatgatattgagaagacagacccctggtttgctcacaggacccccatgcccaagatccagaatgtgagctcctctgacctgctgatgctgctgaggcagtctcctaccccccatgggctgtccctgagtgacctgcaggaggccaagtatgagaccttctcagatgaccccagcccaggagccattgattccaacaacagcctgtcagagatgacccacttcaggccccagctgcaccactctggggacatggtgttcacccctgagtctgggctgcagctgaggctgaatgagaagctgggcaccactgcagccacagagctcaagaagctggactttaaggtgagctccaccagcaacaacctgatcagcacaatccctagtgacaatctggctgctggcacagacaacacctcctccctgggcccccccagcatgcctgtgcactatgactcccagctggacaccaccctgtttgggaagaagtccagccccctgacagagtcagggggccccctgtccctctctgaggagaacaatgacagtaagctgctggagagtgggctgatgaactcccaggagtcctcctggggaaagaatgtctccagcagggagatcaccaggaccaccctgcagagtgaccaggaggagattgactatgatgacaccatctctgtggagatgaagaaggaggactttgacatctatgatgaggatgagaaccagagccctagaagcttccagaagaagaccagacactacttcattgctgcagtggaaagactgtgggactatgggatgagctcctccccccatgtgctgaggaacagggcccagtctggctctgtgccccagttcaagaaggtggtgttccaggagttcactgatggctccttcacccagcccctgtacaggggagagctgaatgagcacctgggcctgctgggcccctacatcagggctgaggtggaggacaatatcatggtgaccttcagaaaccaggcctccagaccttactccttctacagcagcctgatctcctatgaggaggaccagagacagggggctgagcccaggaagaactttgtgaagcccaatgagaccaagacctacttctggaaggtgcagcaccacatggcccccaccaaggatgagtttgactgcaaggcctgggcctacttctctgatgtggacctggagaaggatgtgcactctggcctgattggccccctgctggtgtgccacaccaacaccctgaaccctgcccatggcaggcaggtgactgtgcaggagtttgccctgttcttcaccatctttgatgagaccaagagctggtacttcactgagaacatggagaggaactgcagggccccctgcaacatccagatggaggaccccaccttcaaggagaactacaggttccatgccatcaatggctacatcatggacaccctgcctggcctggtgatggcccaggaccagaggatcaggtggtacctgctgagcatggggagcaatgagaacatccacagcatccacttctctggccatgtgttcacagtgaggaagaaggaggagtacaagatggccctgtacaacctgtaccctggggtgtttgagacagtggagatgctgccctccaaggctggaatctggagggtggagtgcctgattggggagcacctgcatgctggcatgagcaccctgttcctggtgtacagcaacaagtgccagacccccctgggcatggcctctggccacatcagagacttccagatcacagcctcaggccagtatggccagtgggcccccaagctggccaggctgcactactctggcagcatcaatgcctggtccaccaaggagcccttcagctggatcaaggtggacctcctggcccccatgatcatccatggcatcaagacccagggggccaggcagaagttcagctccctgtacatctcccagttcatcatcatgtactccctggatggcaagaagtggcagacctacagaggcaacagcacaggcaccctgatggtgttctttggcaatgtggacagctctgggatcaagcacaacatcttcaacccccccatcattgccaggtacatcagactgcaccccacccactactccatcaggtccaccctgagaatggagctgatgggctgtgacctgaacagctgcagcatgcccctgggcatggagagcaaggccatctctgatgcccagatcacagccagcagctacttcaccaacatgtttgccacctggtcccccagcaaggccaggctgcacctgcagggcaggagcaatgcctggaggccccaggtgaacaaccccaaggagtggctgcaggtggacttccagaagaccatgaaggtgacaggggtgaccacccagggggtgaagtccctgctgaccagcatgtatgtgaaggagttcctgatcagcagctcccaggatggccaccagtggaccctgttcttccagaatggcaaggtgaaggtgttccagggcaaccaggacagcttcacccctgtggtgaactccctggacccccccctgctgaccagatacctgaggatccacccccagtcctgggtgcaccagattgccctgagaatggaggtgctgggctgtgaggcccaggacctgtactgattaattaagctcgctttcttgctgtccaatttctattaaaggttcctttgttccctaagtccaactactaaactgggggatattatgaagggccttgagcatctggattctgcctaataaaaaacatttattttcattgcaatgatgtatttaaattatttctgaatattttactaaaaagggaatgtgggaggtcagtgcatttaaaacataaagaaatgaagagctagttcaaaccttgggaaaatacactatatcttaaactccatgaaagaaggtgaggctgcaaacagctaatgcacattggcaacagcccctgatgcctatgccttattcatccctcagaaaaggattcaagtagaggcttgatttggaggttaaagttttgctatgctgtattttatgtgccttctagttgccagccatctgttgtttgcccctcccccgtgccttccttgaccctggaaggtgccactcccactgtcctttcctaataaaatgaggaaattgcatcgcattgtctgagtaggtgtcattctattctggggggtggggtggggcaggacagcaagggggaggattgggaagacaatagcaggcatgctggggatgcggtgggctctatggctctagagcatggctacgtagataagtagcatggcgggttaatcattaactacacctgcaggaggaacccctagtgatggagttggccactccctctctgcgcgctcgctcgctcactgaggccgggcgaccaaaggtcgcccgacgcccgggcggcctcagtgagcgagcgagcgcgcagctgcctgcagg

SEQ ID NO: 14 - DNA, 6789 bp, Artificial Sequence
  Description of Artificial Sequence: Synthetic polynucleotide
cctgcaggcagctgcgcgctcgctcgctcactgaggccgcccgggcaaagcccgggcgtcgggcgacctttggtcgcccggcctcagtgagcgagcgagcgcgcagagagggagtggccaactccatcactaggggttccttgtagttaatgattaacccgccatgctacttatcgcggccgccggtacgcgggggaggctgctggtgaatattaaccaaggtcaccccagttatcggaggagcaaacaggggctaagtccaccgggggaggctgctggtgaatattaaccaaggtcaccccagttatcggaggagcaaacaggggctaagtccaccgggggaggctgctggtgaatattaaccaaggtcaccccagttatcggaggagcaaacaggggctaagtccactgtacaacgcgtgaattcgctagcgtctgtctgcacatttcgtagagcgagtgttccgatactctaatctccctaggcaaggttcatatttgtgtaggttacttattctccttttgttgactaagtcaataatcagaatcagcaggtttggagtcagcttggcagggatcagcagcctgggttggaaggagggggtataaaagccccttcaccaggagaagccgtcacacagatccacaagctcctgtctagaaagaggtaagggtttaagggatggttggttggtggggtattaatgtttaattacctggagcacctgcctgaaatcactttttttcaggttgggtttaaacgccgccaccatgcaaattgagttatccacctgtttcttcctctgtctcctgaggttctgcttctctgccaccaggagatactacctgggggctgtggagctgtcctgggactacatgcagtcagacctgggggagctgccagttgatgccaggttcccccccagagtccccaagtccttccccttcaacacctcagtggtgtacaaaaagaccctgtttgtggagttcacagaccacctgttcaacatagccaagcccaggcccccctggatgggcctgctgggccccaccatccaggcagaggtttatgacacagtggtcatcaccctgaagaacatggcctcccaccctgtgtccctccatgctgtgggggtgagctactggaaggccagtgagggggcagaatatgatgaccagaccagccagagggagaaggaggatgacaaggtgttcccagggggcagccacacctatgtgtggcaggtcctgaaggagaatggccccatggcctctgaccccctctgcctcacctactcctacctgtcccatgtggacctggtgaaggacctcaactctggcctgattggagccctcctggtgtgcagggaggggagcctggccaaggaaaagacccagaccctgcacaagtttatcctgctctttgcagtctttgatgaggggaagtcctggcacagtgagaccaagaactccctgatgcaggacagagatgctgcctcagccagggcctggcccaagatgcacacagtgaatgggtatgtcaacaggagcctgccaggcctgattgggtgccacagaaagtcagtgtactggcatgtcattggcatgggcaccaccccagaggtgcactccatcttcctggagggccacaccttcctggtgaggaaccacagacaggccagcctggagatcagcccaatcaccttcctcacagcccagaccctcctcatggacctgggccagtttctcctgagctgccacatctcctcccaccagcatgatggcatggaggcctatgtgaaggtggacagctgccctgaggagccccagctcaggatgaagaacaatgaggaggcagaggactatgatgatgatctgacagactctgagatggatgtggtgagatttgatgatgacaacagcccctccttcatccagatcaggtctgtggccaagaagcaccctaagacctgggtgcactacattgcagctgaggaggaggactgggactatgcccccctggtcctggcccctgatgataggtcctacaagtcccagtacctgaacaatggcccccagaggatagggagaaagtacaagaaggtgaggttcatggcctacactgatgagaccttcaagactagggaagccatccagcatgagtctgggatcctgggccccctcctctatggggaggtgggggacaccctgctgatcatcttcaagaaccaggccagcaggccctacaacatttacccccatgggatcacagatgtgagacccctgtacagcaggagactgccaaagggggtgaagcacctgaaggacttccccatcctgccaggggagatcttcaagtacaagtggactgtgacagtggaggatgggcccaccaaatctgaccctagatgcctgaccagatactacagcagctttgtgaacatggagagggacctggcctctggactgattggccctctgctgatctgctacaaggagagtgtggaccagaggggaaaccagatcatgtctgacaagaggaatgtgatcctgttctcagtgtttgatgagaacagatcctggtacctcactgagaacatccagaggttcctgcccaacccagcaggggtgcagctggaggacccagagttccaggcctccaacatcatgcactccatcaatggctatgtctttgactccctgcagctgtcagtgtgcctgcatgaggtggcctactggtacatcctctccattggagcccagactgacttcctgtcagtcttcttcagtggctacaccttcaagcacaagatggtctatgaggacactctgaccctgttccccttctctggggagactgtgttcatgtccatggagaaccctggactgtggatcctgggctgccacaacagtgacttcaggaacaggggcatgactgccctgctgaaggtctccagctgtgacaagaacactggggactactatgaggactcctatgaggacatctctgcctacctgctgtccaagaacaatgccattgagcccaggtccttctcccagaacagcagacacccctccaccaggcagaagcagttcaatgcaaccaccatccctgaaaatgatattgagaagacagacccctggtttgctcacaggacccccatgcccaagatccagaatgtgagctcctctgacctgctgatgctgctgaggcagtctcctaccccccatgggctgtccctgagtgacctgcaggaggccaagtatgagaccttctcagatgaccccagcccaggagccattgattccaacaacagcctgtcagagatgacccacttcaggccccagctgcaccactctggggacatggtgttcacccctgagtctgggctgcagctgaggctgaatgagaagctgggcaccactgcagccacagagctcaagaagctggactttaaggtgagctccaccagcaacaacctgatcagcacaatccctagtgacaatctggctgctggcacagacaacacctcctccctgggcccccccagcatgcctgtgcactatgactcccagctggacaccaccctgtttgggaagaagtccagccccctgacagagtcagggggccccctgtccctctctgaggagaacaatgacagtaagctgctggagagtgggctgatgaactcccaggagtcctcctggggaaagaatgtctccagcagggagatcaccaggaccaccctgcagagtgaccaggaggagattgactatgatgacaccatctctgtggagatgaagaaggaggactttgacatctatgatgaggatgagaaccagagccctagaagcttccagaagaagaccagacactacttcattgctgcagtggaaagactgtgggactatgggatgagctcctccccccatgtgctgaggaacagggcccagtctggctctgtgccccagttcaagaaggtggtgttccaggagttcactgatggctccttcacccagcccctgtacaggggagagctgaatgagcacctgggcctgctgggcccctacatcagggctgaggtggaggacaatatcatggtgaccttcagaaaccaggcctccagaccttactccttctacagcagcctgatctcctatgaggaggaccagagacagggggctgagcccaggaagaactttgtgaagcccaatgagaccaagacctacttctggaaggtgcagcaccacatggcccccaccaaggatgagtttgactgcaaggcctgggcctacttctctgatgtggacctggagaaggatgtgcactctggcctgattggccccctgctggtgtgccacaccaacaccctgaaccctgcccatggcaggcaggtgactgtgcaggagtttgccctgttcttcaccatctttgatgagaccaagagctggtacttcactgagaacatggagaggaactgcagggccccctgcaacatccagatggaggaccccaccttcaaggagaactacaggttccatgccatcaatggctacatcatggacaccctgcctggcctggtgatggcccaggaccagaggatcaggtggtacctgctgagcatggggagcaatgagaacatccacagcatccacttctctggccatgtgttcacagtgaggaagaaggaggagtacaagatggccctgtacaacctgtaccctggggtgtttgagacagtggagatgctgccctccaaggctggaatctggagggtggagtgcctgattggggagcacctgcatgctggcatgagcaccctgttcctggtgtacagcaacaagtgccagacccccctgggcatggcctctggccacatcagagacttccagatcacagcctcaggccagtatggccagtgggcccccaagctggccaggctgcactactctggcagcatcaatgcctggtccaccaaggagcccttcagctggatcaaggtggacctcctggcccccatgatcatccatggcatcaagacccagggggccaggcagaagttcagctccctgtacatctcccagttcatcatcatgtactccctggatggcaagaagtggcagacctacagaggcaacagcacaggcaccctgatggtgttctttggcaatgtggacagctctgggatcaagcacaacatcttcaacccccccatcattgccaggtacatcagactgcaccccacccactactccatcaggtccaccctgagaatggagctgatgggctgtgacctgaacagctgcagcatgcccctgggcatggagagcaaggccatctctgatgcccagatcacagccagcagctacttcaccaacatgtttgccacctggtcccccagcaaggccaggctgcacctgcagggcaggagcaatgcctggaggccccaggtgaacaaccccaaggagtggctgcaggtggacttccagaagaccatgaaggtgacaggggtgaccacccagggggtgaagtccctgctgaccagcatgtatgtgaaggagttcctgatcagcagctcccaggatggccaccagtggaccctgttcttccagaatggcaaggtgaaggtgttccagggcaaccaggacagcttcacccctgtggtgaactccctggacccccccctgctgaccagatacctgaggatccacccccagtcctgggtgcaccagattgccctgagaatggaggtgctgggctgtgaggcccaggacctgtactgattaattaagagcatcttaccgccatttattcccatatttgttctgtttttcttgatttgggtatacatttaaatgttaataaaacaaaatggtggggcaatcatttacatttttagggatatgtaattactagttcaggtgtattgccacaagacaaacatgttaagaaactttcccgttatttacgctctgttcctgttaatcaacctctggattacaaaatttgtgaaagattgactgatattcttaactatgttgctccttttacgctgtgtggatatgctgctttatagcctctgtatctagctattgcttcccgtacggctttcgttttctcctccttgtataaatcctggttgctgtctcttttagaggagttgtggcccgttgtccgtcaacgtggcgtggtgtgctctgtgtttgctgacgcaacccccactggctggggcattgccaccacctgtcaactcctttctgggactttcgctttccccctcccgatcgccacggcagaactcatcgccgcctgccttgcccgctgctggacaggggctaggttgctgggcactgataattccgtggtgttgtctgtgccttctagttgccagccatctgttgtttgcccctcccccgtgccttccttgaccctggaaggtgccactcccactgtcctttcctaataaaatgaggaaattgcatcgcattgtctgagtaggtgtcattctattctggggggtggggtggggcaggacagcaagggggaggattgggaagacaatagcaggcatgctggggatgcggtgggctctatggctctagagcatggctacgtagataagtagcatggcgggttaatcattaactacacctgcaggaggaacccctagtgatggagttggccactccctctctgcgcgctcgctcgctcactgaggccgggcgaccaaaggtcgcccgacgcccgggcggcctcagtgagcgagcgagcgcgcagctgcctgcagg

SEQ ID NO: 15 - DNA, 7301 bp, Artificial Sequence
  Description of Artificial Sequence: Synthetic polynucleotide
cctgcaggcagctgcgcgctcgctcgctcactgaggccgcccgggcaaagcccgggcgtcgggcgacctttggtcgcccggcctcagtgagcgagcgagcgcgcagagagggagtggccaactccatcactaggggttccttgtagttaatgattaacccgccatgctacttatcgcggccgcaggctcagaggcacacaggagtttctgggctcaccctgcccccttccaacccctcagttcccatcctccagcagctgtttgtgtgctgcctctgaagtccacactgaacaaacttcagcctactcatgtccctaaaatgggcaaacattgcaagcagcaaacagcaaacacacagccctccctgcctgctgaccttggagctggggcagaggtcagagacctctctgggcccatgccacctccaacatccacttgaccccttggaatttcagtggagaggagcagaggttgtcctggtgtggtttaggtagtgtgagagggtccaggttcaaaaccacttgctgggtggggagttgtcagtaagtggctatgccccaaccctgaagcctgtttccccatctgtacaatggaaatgataaagacccccatctgatagggtttttgtggcaaataaacatttggtttttttgttttgttttgttttgttttttgagatggaggtttgctctgtggcccaggctggagtgcagtgacacaatctcatctcaccacaaccttcccctgcctcagcctcccaagtagctgggattacaagcatgtgccaccacacctggctaattttctatttttagtagagatgggtttctccatgttggtcagcctcagcctcccaagtaactgggattacaggcctgtgccaccacacctggctaattttttctatttttgacagggatggggtttcaccatgttggtcaggctggtctagaggtactggatcttgctaccagtggaacagccactaaggattctgcagtgagagcagagggccagctaagtggtactctcccagagactgtctgactcatgccaccccctccaccttggacacaggacactgtggtttctgagccaggtacaatgactccttttggtaagtgcagtggaagctgtacactgcccaggcaaagtgtctgggcagcataggcaggtgactcagatcccagccagtggacttagcccctgtttgctcctctgataactggggtgaccttggttaatattcaccagcagcctcccctgttgcccctctggatccactgcttaaatacagacaaggacagggccctgtctcctcagcttcaggcaccaccactgacctgggacagtgaataattactctaaggtaaatataaaatttttaagtgtataatgtgttaaactactgattctaattgtttctctcttttagattccaacctttggaactgagtttaaacgccgccaccatgcaaattgagttatccacctgtttcttcctctgtctcctgaggttctgcttctctgccaccaggagatactacctgggggctgtggagctgtcctgggactacatgcagtcagacctgggggagctgccagttgatgccaggttcccccccagagtccccaagtccttccccttcaacacctcagtggtgtacaaaaagaccctgtttgtggagttcacagaccacctgttcaacatagccaagcccaggcccccctggatgggcctgctgggccccaccatccaggcagaggtttatgacacagtggtcatcaccctgaagaacatggcctcccaccctgtgtccctccatgctgtgggggtgagctactggaaggccagtgagggggcagaatatgatgaccagaccagccagagggagaaggaggatgacaaggtgttcccagggggcagccacacctatgtgtggcaggtcctgaaggagaatggccccatggcctctgaccccctctgcctcacctactcctacctgtcccatgtggacctggtgaaggacctcaactctggcctgattggagccctcctggtgtgcagggaggggagcctggccaaggaaaagacccagaccctgcacaagtttatcctgctctttgcagtctttgatgaggggaagtcctggcacagtgagaccaagaactccctgatgcaggacagagatgctgcctcagccagggcctggcccaagatgcacacagtgaatgggtatgtcaacaggagcctgccaggcctgattgggtgccacagaaagtcagtgtactggcatgtcattggcatgggcaccaccccagaggtgcactccatcttcctggagggccacaccttcctggtgaggaaccacagacaggccagcctggagatcagcccaatcaccttcctcacagcccagaccctcctcatggacctgggccagtttctcctgagctgccacatctcctcccaccagcatgatggcatggaggcctatgtgaaggtggacagctgccctgaggagccccagctcaggatgaagaacaatgaggaggcagaggactatgatgatgatctgacagactctgagatggatgtggtgagatttgatgatgacaacagcccctccttcatccagatcaggtctgtggccaagaagcaccctaagacctgggtgcactacattgcagctgaggaggaggactgggactatgcccccctggtcctggcccctgatgataggtcctacaagtcccagtacctgaacaatggcccccagaggatagggagaaagtacaagaaggtgaggttcatggcctacactgatgagaccttcaagactagggaagccatccagcatgagtctgggatcctgggccccctcctctatggggaggtgggggacaccctgctgatcatcttcaagaaccaggccagcaggccctacaacatttacccccatgggatcacagatgtgagacccctgtacagcaggagactgccaaagggggtgaagcacctgaaggacttccccatcctgccaggggagatcttcaagtacaagtggactgtgacagtggaggatgggcccaccaaatctgaccctagatgcctgaccagatactacagcagctttgtgaacatggagagggacctggcctctggactgattggccctctgctgatctgctacaaggagagtgtggaccagaggggaaaccagatcatgtctgacaagaggaatgtgatcctgttctcagtgtttgatgagaacagatcctggtacctcactgagaacatccagaggttcctgcccaacccagcaggggtgcagctggaggacccagagttccaggcctccaacatcatgcactccatcaatggctatgtctttgactccctgcagctgtcagtgtgcctgcatgaggtggcctactggtacatcctctccattggagcccagactgacttcctgtcagtcttcttcagtggctacaccttcaagcacaagatggtctatgaggacactctgaccctgttccccttctctggggagactgtgttcatgtccatggagaaccctggactgtggatcctgggctgccacaacagtgacttcaggaacaggggcatgactgccctgctgaaggtctccagctgtgacaagaacactggggactactatgaggactcctatgaggacatctctgcctacctgctgtccaagaacaatgccattgagcccaggtccttctcccagaacagcagacacccctccaccaggcagaagcagttcaatgcaaccaccatccctgaaaatgatattgagaagacagacccctggtttgctcacaggacccccatgcccaagatccagaatgtgagctcctctgacctgctgatgctgctgaggcagtctcctaccccccatgggctgtccctgagtgacctgcaggaggccaagtatgagaccttctcagatgaccccagcccaggagccattgattccaacaacagcctgtcagagatgacccacttcaggccccagctgcaccactctggggacatggtgttcacccctgagtctgggctgcagctgaggctgaatgagaagctgggcaccactgcagccacagagctcaagaagctggactttaaggtgagctccaccagcaacaacctgatcagcacaatccctagtgacaatctggctgctggcacagacaacacctcctccctgggcccccccagcatgcctgtgcactatgactcccagctggacaccaccctgtttgggaagaagtccagccccctgacagagtcagggggccccctgtccctctctgaggagaacaatgacagtaagctgctggagagtgggctgatgaactcccaggagtcctcctggggaaagaatgtctccagcagggagatcaccaggaccaccctgcagagtgaccaggaggagattgactatgatgacaccatctctgtggagatgaagaaggaggactttgacatctatgatgaggatgagaaccagagccctagaagcttccagaagaagaccagacactacttcattgctgcagtggaaagactgtgggactatgggatgagctcctccccccatgtgctgaggaacagggcccagtctggctctgtgccccagttcaagaaggtggtgttccaggagttcactgatggctccttcacccagcccctgtacaggggagagctgaatgagcacctgggcctgctgggcccctacatcagggctgaggtggaggacaatatcatggtgaccttcagaaaccaggcctccagaccttactccttctacagcagcctgatctcctatgaggaggaccagagacagggggctgagcccaggaagaactttgtgaagcccaatgagaccaagacctacttctggaaggtgcagcaccacatggcccccaccaaggatgagtttgactgcaaggcctgggcctacttctctgatgtggacctggagaaggatgtgcactctggcctgattggccccctgctggtgtgccacaccaacaccctgaaccctgcccatggcaggcaggtgactgtgcaggagtttgccctgttcttcaccatctttgatgagaccaagagctggtacttcactgagaacatggagaggaactgcagggccccctgcaacatccagatggaggaccccaccttcaaggagaactacaggttccatgccatcaatggctacatcatggacaccctgcctggcctggtgatggcccaggaccagaggatcaggtggtacctgctgagcatggggagcaatgagaacatccacagcatccacttctctggccatgtgttcacagtgaggaagaaggaggagtacaagatggccctgtacaacctgtaccctggggtgtttgagacagtggagatgctgccctccaaggctggaatctggagggtggagtgcctgattggggagcacctgcatgctggcatgagcaccctgttcctggtgtacagcaacaagtgccagacccccctgggcatggcctctggccacatcagagacttccagatcacagcctcaggccagtatggccagtgggcccccaagctggccaggctgcactactctggcagcatcaatgcctggtccaccaaggagcccttcagctggatcaaggtggacctcctggcccccatgatcatccatggcatcaagacccagggggccaggcagaagttcagctccctgtacatctcccagttcatcatcatgtactccctggatggcaagaagtggcagacctacagaggcaacagcacaggcaccctgatggtgttctttggcaatgtggacagctctgggatcaagcacaacatcttcaacccccccatcattgccaggtacatcagactgcaccccacccactactccatcaggtccaccctgagaatggagctgatgggctgtgacctgaacagctgcagcatgcccctgggcatggagagcaaggccatctctgatgcccagatcacagccagcagctacttcaccaacatgtttgccacctggtcccccagcaaggccaggctgcacctgcagggcaggagcaatgcctggaggccccaggtgaacaaccccaaggagtggctgcaggtggacttccagaagaccatgaaggtgacaggggtgaccacccagggggtgaagtccctgctgaccagcatgtatgtgaaggagttcctgatcagcagctcccaggatggccaccagtggaccctgttcttccagaatggcaaggtgaaggtgttccagggcaaccaggacagcttcacccctgtggtgaactccctggacccccccctgctgaccagatacctgaggatccacccccagtcctgggtgcaccagattgccctgagaatggaggtgctgggctgtgaggcccaggacctgtactgattaattaagctcgctttcttgctgtccaatttctattaaaggttcctttgttccctaagtccaactactaaactgggggatattatgaagggccttgagcatctggattctgcctaataaaaaacatttattttcattgcaatgatgtatttaaattatttctgaatattttactaaaaagggaatgtgggaggtcagtgcatttaaaacataaagaaatgaagagctagttcaaaccttgggaaaatacactatatcttaaactccatgaaagaaggtgaggctgcaaacagctaatgcacattggcaacagcccctgatgcctatgccttattcatccctcagaaaaggattcaagtagaggcttgatttggaggttaaagttttgctatgctgtattttacagacatgataagatacattgatgagtttggacaaaccacaactagaatgcagtgaaaaaaatgctttatttgtgaaatttgtgatgctattgctttatttgtaaccattataagctgcaataaacaagttaacaacaacaattgcattcattttatgtttcaggttcagggggagatgtgggaggttttttaaagcaagtaaaacctctacaaatgtggtatctagagcatggctacgtagataagtagcatggcgggttaatcattaactacacctgcaggaggaacccctagtgatggagttggccactccctctctgcgcgctcgctcgctcactgaggccgggcgaccaaaggtcgcccgacgcccgggcggcctcagtgagcgagcgagcgcgcagctgcctgcagg

SEQ ID NO: 16 - DNA, 6617 bp, Artificial Sequence
  Description of Artificial Sequence: Synthetic polynucleotide
cctgcaggcagctgcgcgctcgctcgctcactgaggccgcccgggcaaagcccgggcgtcgggcgacctttggtcgcccggcctcagtgagcgagcgagcgcgcagagagggagtggccaactccatcactaggggttccttgtagttaatgattaacccgccatgctacttatcgcggccgccgggggaggctgctggtgaatattaaccaaggtcaccccagttatcggaggagcaaacaggggctaagtccacacgcgtggtaccgtctgtctgcacatttcgtagagcgagtgttccgatactctaatctccctaggcaaggttcatatttgtgtaggttacttattctccttttgttgactaagtcaataatcagaatcagcaggtttggagtcagcttggcagggatcagcagcctgggttggaaggagggggtataaaagccccttcaccaggagaagccgtcacacagatccacaagctcctgaagaggtaagggtttaagggatggttggttggtggggtattaatgtttaattacctggagcacctgcctgaaatcactttttttcaggttggtttaaacgccgccaccatgcaaattgagttatccacctgtttcttcctctgtctcctgaggttctgcttctctgccaccaggagatactacctgggggctgtggagctgtcctgggactacatgcagtcagacctgggggagctgccagttgatgccaggttcccccccagagtccccaagtccttccccttcaacacctcagtggtgtacaaaaagaccctgtttgtggagttcacagaccacctgttcaacatagccaagcccaggcccccctggatgggcctgctgggccccaccatccaggcagaggtttatgacacagtggtcatcaccctgaagaacatggcctcccaccctgtgtccctccatgctgtgggggtgagctactggaaggccagtgagggggcagaatatgatgaccagaccagccagagggagaaggaggatgacaaggtgttcccagggggcagccacacctatgtgtggcaggtcctgaaggagaatggccccatggcctctgaccccctctgcctcacctactcctacctgtcccatgtggacctggtgaaggacctcaactctggcctgattggagccctcctggtgtgcagggaggggagcctggccaaggaaaagacccagaccctgcacaagtttatcctgctctttgcagtctttgatgaggggaagtcctggcacagtgagaccaagaactccctgatgcaggacagagatgctgcctcagccagggcctggcccaagatgcacacagtgaatgggtatgtcaacaggagcctgccaggcctgattgggtgccacagaaagtcagtgtactggcatgtcattggcatgggcaccaccccagaggtgcactccatcttcctggagggccacaccttcctggtgaggaaccacagacaggccagcctggagatcagcccaatcaccttcctcacagcccagaccctcctcatggacctgggccagtttctcctgagctgccacatctcctcccaccagcatgatggcatggaggcctatgtgaaggtggacagctgccctgaggagccccagctcaggatgaagaacaatgaggaggcagaggactatgatgatgatctgacagactctgagatggatgtggtgagatttgatgatgacaacagcccctccttcatccagatcaggtctgtggccaagaagcaccctaagacctgggtgcactacattgcagctgaggaggaggactgggactatgcccccctggtcctggcccctgatgataggtcctacaagtcccagtacctgaacaatggcccccagaggatagggagaaagtacaagaaggtgaggttcatggcctacactgatgagaccttcaagactagggaagccatccagcatgagtctgggatcctgggccccctcctctatggggaggtgggggacaccctgctgatcatcttcaagaaccaggccagcaggccctacaacatttacccccatgggatcacagatgtgagacccctgtacagcaggagactgccaaagggggtgaagcacctgaaggacttccccatcctgccaggggagatcttcaagtacaagtggactgtgacagtggaggatgggcccaccaaatctgaccctagatgcctgaccagatactacagcagctttgtgaacatggagagggacctggcctctggactgattggccctctgctgatctgctacaaggagagtgtggaccagaggggaaaccagatcatgtctgacaagaggaatgtgatcctgttctcagtgtttgatgagaacagatcctggtacctcactgagaacatccagaggttcctgcccaacccagcaggggtgcagctggaggacccagagttccaggcctccaacatcatgcactccatcaatggctatgtctttgactccctgcagctgtcagtgtgcctgcatgaggtggcctactggtacatcctctccattggagcccagactgacttcctgtcagtcttcttcagtggctacaccttcaagcacaagatggtctatgaggacactctgaccctgttccccttctctggggagactgtgttcatgtccatggagaaccctggactgtggatcctgggctgccacaacagtgacttcaggaacaggggcatgactgccctgctgaaggtctccagctgtgacaagaacactggggactactatgaggactcctatgaggacatctctgcctacctgctgtccaagaacaatgccattgagcccaggtccttctcccagaacagcagacacccctccaccaggcagaagcagttcaatgcaaccaccatccctgaaaatgatattgagaagacagacccctggtttgctcacaggacccccatgcccaagatccagaatgtgagctcctctgacctgctgatgctgctgaggcagtctcctaccccccatgggctgtccctgagtgacctgcaggaggccaagtatgagaccttctcagatgaccccagcccaggagccattgattccaacaacagcctgtcagagatgacccacttcaggccccagctgcaccactctggggacatggtgttcacccctgagtctgggctgcagctgaggctgaatgagaagctgggcaccactgcagccacagagctcaagaagctggactttaaggtgagctccaccagcaacaacctgatcagcacaatccctagtgacaatctggctgctggcacagacaacacctcctccctgggcccccccagcatgcctgtgcactatgactcccagctggacaccaccctgtttgggaagaagtccagccccctgacagagtcagggggccccctgtccctctctgaggagaacaatgacagtaagctgctggagagtgggctgatgaactcccaggagtcctcctggggaaagaatgtctccagcagggagatcaccaggaccaccctgcagagtgaccaggaggagattgactatgatgacaccatctctgtggagatgaagaaggaggactttgacatctatgatgaggatgagaaccagagccctagaagcttccagaagaagaccagacactacttcattgctgcagtggaaagactgtgggactatgggatgagctcctccccccatgtgctgaggaacagggcccagtctggctctgtgccccagttcaagaaggtggtgttccaggagttcactgatggctccttcacccagcccctgtacaggggagagctgaatgagcacctgggcctgctgggcccctacatcagggctgaggtggaggacaatatcatggtgaccttcagaaaccaggcctccagaccttactccttctacagcagcctgatctcctatgaggaggaccagagacagggggctgagcccaggaagaactttgtgaagcccaatgagaccaagacctacttctggaaggtgcagcaccacatggcccccaccaaggatgagtttgactgcaaggcctgggcctacttctctgatgtggacctggagaaggatgtgcactctggcctgattggccccctgctggtgtgccacaccaacaccctgaaccctgcccatggcaggcaggtgactgtgcaggagtttgccctgttcttcaccatctttgatgagaccaagagctggtacttcactgagaacatggagaggaactgcagggccccctgcaacatccagatggaggaccccaccttcaaggagaactacaggttccatgccatcaatggctacatcatggacaccctgcctggcctggtgatggcccaggaccagaggatcaggtggtacctgctgagcatggggagcaatgagaacatccacagcatccacttctctggccatgtgttcacagtgaggaagaaggaggagtacaagatggccctgtacaacctgtaccctggggtgtttgagacagtggagatgctgccctccaaggctggaatctggagggtggagtgcctgattggggagcacctgcatgctggcatgagcaccctgttcctggtgtacagcaacaagtgccagacccccctgggcatggcctctggccacatcagagacttccagatcacagcctcaggccagtatggccagtgggcccccaagctggccaggctgcactactctggcagcatcaatgcctggtccaccaaggagcccttcagctggatcaaggtggacctcctggcccccatgatcatccatggcatcaagacccagggggccaggcagaagttcagctccctgtacatctcccagttcatcatcatgtactccctggatggcaagaagtggcagacctacagaggcaacagcacaggcaccctgatggtgttctttggcaatgtggacagctctgggatcaagcacaacatcttcaacccccccatcattgccaggtacatcagactgcaccccacccactactccatcaggtccaccctgagaatggagctgatgggctgtgacctgaacagctgcagcatgcccctgggcatggagagcaaggccatctctgatgcccagatcacagccagcagctacttcaccaacatgtttgccacctggtcccccagcaaggccaggctgcacctgcagggcaggagcaatgcctggaggccccaggtgaacaaccccaaggagtggctgcaggtggacttccagaagaccatgaaggtgacaggggtgaccacccagggggtgaagtccctgctgaccagcatgtatgtgaaggagttcctgatcagcagctcccaggatggccaccagtggaccctgttcttccagaatggcaaggtgaaggtgttccagggcaaccaggacagcttcacccctgtggtgaactccctggacccccccctgctgaccagatacctgaggatccacccccagtcctgggtgcaccagattgccctgagaatggaggtgctgggctgtgaggcccaggacctgtactgattaattaagagcatcttaccgccatttattcccatatttgttctgtttttcttgatttgggtatacatttaaatgttaataaaacaaaatggtggggcaatcatttacatttttagggatatgtaattactagttcaggtgtattgccacaagacaaacatgttaagaaactttcccgttatttacgctctgttcctgttaatcaacctctggattacaaaatttgtgaaagattgactgatattcttaactatgttgctccttttacgctgtgtggatatgctgctttatagcctctgtatctagctattgcttcccgtacggctttcgttttctcctccttgtataaatcctggttgctgtctcttttagaggagttgtggcccgttgtccgtcaacgtggcgtggtgtgctctgtgtttgctgacgcaacccccactggctggggcattgccaccacctgtcaactcctttctgggactttcgctttccccctcccgatcgccacggcagaactcatcgccgcctgccttgcccgctgctggacaggggctaggttgctgggcactgataattccgtggtgttgtctgtgccttctagttgccagccatctgttgtttgcccctcccccgtgccttccttgaccctggaaggtgccactcccactgtcctttcctaataaaatgaggaaattgcatcgcattgtctgagtaggtgtcattctattctggggggtggggtggggcaggacagcaagggggaggattgggaagacaatagcaggcatgctggggatgcggtgggctctatggctctagagcatggctacgtagataagtagcatggcgggttaatcattaactacacctgcaggaggaacccctagtgatggagttggccactccctctctgcgcgctcgctcgctcactgaggccgggcgaccaaaggtcgcccgacgcccgggcggcctcagtgagcgagcgagcgcgcagctgcctgcagg

SEQ ID NO: 17 - DNA, 6478 bp, Artificial Sequence
  Description of Artificial Sequence: Synthetic polynucleotide
cctgcaggcagctgcgcgctcgctcgctcactgaggccgcccgggcaaagcccgggcgtcgggcgacctttggtcgcccggcctcagtgagcgagcgagcgcgcagagagggagtggccaactccatcactaggggttccttgtagttaatgattaacccgccatgctacttatcgcggccgcaacaggttagtttgactagcgttaatcattaacgttaatcattaacgttaatcattaacgttaatcattaacgttaatcattaacatcgatgcgagaacttgtgcctccccgtgttcctgctctttgtccctctgtcctacttagactaatatttgccttgggtactgcaaacaggaaatgggggagggacaggagtagggcggagggtagttaagaatgtcaattggggggaggctgctggtgaatattaaccaaggtcaccccagttatcggaggagcaaacaggggctaagtccaccgggggaggctgctggtgaatattaaccaaggtcaccccagttatcggaggagcaaacaggggctaagtccaccgggggaggctgctggtgaatattaaccaaggtcaccccagttatcggaggagcaaacaggggctaagtccacggtacccactgggaggatgttgagtaagatggaaaactactgatgacccttgcagagacagagtattaggacatgtttgaacaggggccgggcgatcagcaggtagcactagaggatccccgtctgtctgcacatttcgtagagcgagtgttccgatactctaatctccctaggcaaggttcatatttgtgtaggttacttattctccttttgttgactaagtcaataatcagaatcagcaggtttggagtcagcttggcagggatcagcagcctgggttggaaggagggggtataaaagccccttcaccaggagaagccgtcacacagatccacaagctcctgaagaggtaagggtttaagggatggttggttggtggggtattaatgtttaattacctggagcacctgcctgaaatcactttttttcaggttgggtttaaacgccgccaccatgcaaattgagttatccacctgtttcttcctctgtctcctgaggttctgcttctctgccaccaggagatactacctgggggctgtggagctgtcctgggactacatgcagtcagacctgggggagctgccagttgatgccaggttcccccccagagtccccaagtccttccccttcaacacctcagtggtgtacaaaaagaccctgtttgtggagttcacagaccacctgttcaacatagccaagcccaggcccccctggatgggcctgctgggccccaccatccaggcagaggtttatgacacagtggtcatcaccctgaagaacatggcctcccaccctgtgtccctccatgctgtgggggtgagctactggaaggccagtgagggggcagaatatgatgaccagaccagccagagggagaaggaggatgacaaggtgttcccagggggcagccacacctatgtgtggcaggtcctgaaggagaatggccccatggcctctgaccccctctgcctcacctactcctacctgtcccatgtggacctggtgaaggacctcaactctggcctgattggagccctcctggtgtgcagggaggggagcctggccaaggaaaagacccagaccctgcacaagtttatcctgctctttgcagtctttgatgaggggaagtcctggcacagtgagaccaagaactccctgatgcaggacagagatgctgcctcagccagggcctggcccaagatgcacacagtgaatgggtatgtcaacaggagcctgccaggcctgattgggtgccacagaaagtcagtgtactggcatgtcattggcatgggcaccaccccagaggtgcactccatcttcctggagggccacaccttcctggtgaggaaccacagacaggccagcctggagatcagcccaatcaccttcctcacagcccagaccctcctcatggacctgggccagtttctcctgagctgccacatctcctcccaccagcatgatggcatggaggcctatgtgaaggtggacagctgccctgaggagccccagctcaggatgaagaacaatgaggaggcagaggactatgatgatgatctgacagactctgagatggatgtggtgagatttgatgatgacaacagcccctccttcatccagatcaggtctgtggccaagaagcaccctaagacctgggtgcactacattgcagctgaggaggaggactgggactatgcccccctggtcctggcccctgatgataggtcctacaagtcccagtacctgaacaatggcccccagaggatagggagaaagtacaagaaggtgaggttcatggcctacactgatgagaccttcaagactagggaagccatccagcatgagtctgggatcctgggccccctcctctatggggaggtgggggacaccctgctgatcatcttcaagaaccaggccagcaggccctacaacatttacccccatgggatcacagatgtgagacccctgtacagcaggagactgccaaagggggtgaagcacctgaaggacttccccatcctgccaggggagatcttcaagtacaagtggactgtgacagtggaggatgggcccaccaaatctgaccctagatgcctgaccagatactacagcagctttgtgaacatggagagggacctggcctctggactgattggccctctgctgatctgctacaaggagagtgtggaccagaggggaaaccagatcatgtctgacaagaggaatgtgatcctgttctcagtgtttgatgagaacagatcctggtacctcactgagaacatccagaggttcctgcccaacccagcaggggtgcagctggaggacccagagttccaggcctccaacatcatgcactccatcaatggctatgtctttgactccctgcagctgtcagtgtgcctgcatgaggtggcctactggtacatcctctccattggagcccagactgacttcctgtcagtcttcttcagtggctacaccttcaagcacaagatggtctatgaggacactctgaccctgttccccttctctggggagactgtgttcatgtccatggagaaccctggactgtggatcctgggctgccacaacagtgacttcaggaacaggggcatgactgccctgctgaaggtctccagctgtgacaagaacactggggactactatgaggactcctatgaggacatctctgcctacctgctgtccaagaacaatgccattgagcccaggtccttctcccagaacagcagacacccctccaccaggcagaagcagttcaatgcaaccaccatccctgaaaataccaccctgcagagtgaccaggaggagattgactatgatgacaccatctctgtggagatgaagaaggaggactttgacatctatgatgaggatgagaaccagagccctagaagcttccagaagaagaccagacactacttcattgctgcagtggaaagactgtgggactatgggatgagctcctccccccatgtgctgaggaacagggcccagtctggctctgtgccccagttcaagaaggtggtgttccaggagttcactgatggctccttcacccagcccctgtacaggggagagctgaatgagcacctgggcctgctgggcccctacatcagggctgaggtggaggacaatatcatggtgaccttcagaaaccaggcctccagaccttactccttctacagcagcctgatctcctatgaggaggaccagagacagggggctgagcccaggaagaactttgtgaagcccaatgagaccaagacctacttctggaaggtgcagcaccacatggcccccaccaaggatgagtttgactgcaaggcctgggcctacttctctgatgtggacctggagaaggatgtgcactctggcctgattggccccctgctggtgtgccacaccaacaccctgaaccctgcccatggcaggcaggtgactgtgcaggagtttgccctgttcttcaccatctttgatgagaccaagagctggtacttcactgagaacatggagaggaactgcagggccccctgcaacatccagatggaggaccccaccttcaaggagaactacaggttccatgccatcaatggctacatcatggacaccctgcctggcctggtgatggcccaggaccagaggatcaggtggtacctgctgagcatggggagcaatgagaacatccacagcatccacttctctggccatgtgttcacagtgaggaagaaggaggagtacaagatggccctgtacaacctgtaccctggggtgtttgagacagtggagatgctgccctccaaggctggaatctggagggtggagtgcctgattggggagcacctgcatgctggcatgagcaccctgttcctggtgtacagcaacaagtgccagacccccctgggcatggcctctggccacatcagagacttccagatcacagcctcaggccagtatggccagtgggcccccaagctggccaggctgcactactctggcagcatcaatgcctggtccaccaaggagcccttcagctggatcaaggtggacctcctggcccccatgatcatccatggcatcaagacccagggggccaggcagaagttcagctccctgtacatctcccagttcatcatcatgtactccctggatggcaagaagtggcagacctacagaggcaacagcacaggcaccctgatggtgttctttggcaatgtggacagctctgggatcaagcacaacatcttcaacccccccatcattgccaggtacatcagactgcaccccacccactactccatcaggtccaccctgagaatggagctgatgggctgtgacctgaacagctgcagcatgcccctgggcatggagagcaaggccatctctgatgcccagatcacagccagcagctacttcaccaacatgtttgccacctggtcccccagcaaggccaggctgcacctgcagggcaggagcaatgcctggaggccccaggtgaacaaccccaaggagtggctgcaggtggacttccagaagaccatgaaggtgacaggggtgaccacccagggggtgaagtccctgctgaccagcatgtatgtgaaggagttcctgatcagcagctcccaggatggccaccagtggaccctgttcttccagaatggcaaggtgaaggtgttccagggcaaccaggacagcttcacccctgtggtgaactccctggacccccccctgctgaccagatacctgaggatccacccccagtcctgggtgcaccagattgccctgagaatggaggtgctgggctgtgaggcccaggacctgtactgattaattaagagcatcttaccgccatttattcccatatttgttctgtttttcttgatttgggtatacatttaaatgttaataaaacaaaatggtggggcaatcatttacatttttagggatatgtaattactagttcaggtgtattgccacaagacaaacatgttaagaaactttcccgttatttacgctctgttcctgttaatcaacctctggattacaaaatttgtgaaagattgactgatattcttaactatgttgctccttttacgctgtgtggatatgctgctttatagcctctgtatctagctattgcttcccgtacggctttcgttttctcctccttgtataaatcctggttgctgtctcttttagaggagttgtggcccgttgtccgtcaacgtggcgtggtgtgctctgtgtttgctgacgcaacccccactggctggggcattgccaccacctgtcaactcctttctgggactttcgctttccccctcccgatcgccacggcagaactcatcgccgcctgccttgcccgctgctggacaggggctaggttgctgggcactgataattccgtggtgttgtctgtgccttctagttgccagccatctgttgtttgcccctcccccgtgccttccttgaccctggaaggtgccactcccactgtcctttcctaataaaatgaggaaattgcatcgcattgtctgagtaggtgtcattctattctggggggtggggtggggcaggacagcaagggggaggattgggaagacaatagcaggcatgctggggatgcggtgggctctatggctctagagcatggctacgtagataagtagcatggcgggttaatcattaactacacctgcaggaggaacccctagtgatggagttggccactccctctctgcgcgctcgctcgctcactgaggccgggcgaccaaaggtcgcccgacgcccgggcggcctcagtgagcgagcgagcgcgcagctgcctgcagg

SEQ ID NO: 18 - DNA, 6270 bp, Artificial Sequence
  Description of Artificial Sequence: Synthetic polynucleotide
cctgcaggcagctgcgcgctcgctcgctcactgaggccgcccgggcaaagcccgggcgtcgggcgacctttggtcgcccggcctcagtgagcgagcgagcgcgcagagagggagtggccaactccatcactaggggttccttgtagttaatgattaacccgccatgctacttatcgcggccgcagcaacagatcattctatgggttaatcattaacaacaggttaggcttgtactttggtacattggctcctagttaatcattaacttagcaatgtgcttgtactttggtacatagttacctagttaatcattaacaaacagtatggcttgtactttggtacaagcaacagatcattctatgggcgagaacttgtgcctccccgtgttcctgctctttgtccctctgtcctacttagactaatatttgccttgggtactgcaaacaggaaatgggggagggacaggagtagggcggagggtagcaattggattctgcagtgagagcagagggccagctaagtggtactctcccagagactgtctgactcacgccaccccctccaccttggacacaggacgctgtggtttctgagccaggtacaatgactcctttcggtaagtgcagtggaagctgtacactgcccaggcaaagcgtccgggcagcgtaggcgggcgactcagatcccagccagtggacttagcccctgtttgctcctccgataactggggtgaccttggttaatattcaccagcagcctcccccgttgcccctctggatccactgcttaaatacggacgaggacagggccctgtctcctcagcttcaggcaccaccactgacctgggacagtgaatgtttaaacgccgccaccatgcaaattgagttatccacctgtttcttcctctgtctcctgaggttctgcttctctgccaccaggagatactacctgggggctgtggagctgtcctgggactacatgcagtcagacctgggggagctgccagttgatgccaggttcccccccagagtccccaagtccttccccttcaacacctcagtggtgtacaaaaagaccctgtttgtggagttcacagaccacctgttcaacatagccaagcccaggcccccctggatgggcctgctgggccccaccatccaggcagaggtttatgacacagtggtcatcaccctgaagaacatggcctcccaccctgtgtccctccatgctgtgggggtgagctactggaaggccagtgagggggcagaatatgatgaccagaccagccagagggagaaggaggatgacaaggtgttcccagggggcagccacacctatgtgtggcaggtcctgaaggagaatggccccatggcctctgaccccctctgcctcacctactcctacctgtcccatgtggacctggtgaaggacctcaactctggcctgattggagccctcctggtgtgcagggaggggagcctggccaaggaaaagacccagaccctgcacaagtttatcctgctctttgcagtctttgatgaggggaagtcctggcacagtgagaccaagaactccctgatgcaggacagagatgctgcctcagccagggcctggcccaagatgcacacagtgaatgggtatgtcaacaggagcctgccaggcctgattgggtgccacagaaagtcagtgtactggcatgtcattggcatgggcaccaccccagaggtgcactccatcttcctggagggccacaccttcctggtgaggaaccacagacaggccagcctggagatcagcccaatcaccttcctcacagcccagaccctcctcatggacctgggccagtttctcctgagctgccacatctcctcccaccagcatgatggcatggaggcctatgtgaaggtggacagctgccctgaggagccccagctcaggatgaagaacaatgaggaggcagaggactatgatgatgatctgacagactctgagatggatgtggtgagatttgatgatgacaacagcccctccttcatccagatcaggtctgtggccaagaagcaccctaagacctgggtgcactacattgcagctgaggaggaggactgggactatgcccccctggtcctggcccctgatgataggtcctacaagtcccagtacctgaacaatggcccccagaggatagggagaaagtacaagaaggtgaggttcatggcctacactgatgagaccttcaagactagggaagccatccagcatgagtctgggatcctgggccccctcctctatggggaggtgggggacaccctgctgatcatcttcaagaaccaggccagcaggccctacaacatttacccccatgggatcacagatgtgagacccctgtacagcaggagactgccaaagggggtgaagcacctgaaggacttccccatcctgccaggggagatcttcaagtacaagtggactgtgacagtggaggatgggcccaccaaatctgaccctagatgcctgaccagatactacagcagctttgtgaacatggagagggacctggcctctggactgattggccctctgctgatctgctacaaggagagtgtggaccagaggggaaaccagatcatgtctgacaagaggaatgtgatcctgttctcagtgtttgatgagaacagatcctggtacctcactgagaacatccagaggttcctgcccaacccagcaggggtgcagctggaggacccagagttccaggcctccaacatcatgcactccatcaatggctatgtctttgactccctgcagctgtcagtgtgcctgcatgaggtggcctactggtacatcctctccattggagcccagactgacttcctgtcagtcttcttcagtggctacaccttcaagcacaagatggtctatgaggacactctgaccctgttccccttctctggggagactgtgttcatgtccatggagaaccctggactgtggatcctgggctgccacaacagtgacttcaggaacaggggcatgactgccctgctgaaggtctccagctgtgacaagaacactggggactactatgaggactcctatgaggacatctctgcctacctgctgtccaagaacaatgccattgagcccaggtccttctcccagaacagcagacacccctccaccaggcagaagcagttcaatgcaaccaccatccctgaaaataccaccctgcagagtgaccaggaggagattgactatgatgacaccatctctgtggagatgaagaaggaggactttgacatctatgatgaggatgagaaccagagccctagaagcttccagaagaagaccagacactacttcattgctgcagtggaaagactgtgggactatgggatgagctcctccccccatgtgctgaggaacagggcccagtctggctctgtgccccagttcaagaaggtggtgttccaggagttcactgatggctccttcacccagcccctgtacaggggagagctgaatgagcacctgggcctgctgggcccctacatcagggctgaggtggaggacaatatcatggtgaccttcagaaaccaggcctccagaccttactccttctacagcagcctgatctcctatgaggaggaccagagacagggggctgagcccaggaagaactttgtgaagcccaatgagaccaagacctacttctggaaggtgcagcaccacatggcccccaccaaggatgagtttgactgcaaggcctgggcctacttctctgatgtggacctggagaaggatgtgcactctggcctgattggccccctgctggtgtgccacaccaacaccctgaaccctgcccatggcaggcaggtgactgtgcaggagtttgccctgttcttcaccatctttgatgagaccaagagctggtacttcactgagaacatggagaggaactgcagggccccctgcaacatccagatggaggaccccaccttcaaggagaactacaggttccatgccatcaatggctacatcatggacaccctgcctggcctggtgatggcccaggaccagaggatcaggtggtacctgctgagcatggggagcaatgagaacatccacagcatccacttctctggccatgtgttcacagtgaggaagaaggaggagtacaagatggccctgtacaacctgtaccctggggtgtttgagacagtggagatgctgccctccaaggctggaatctggagggtggagtgcctgattggggagcacctgcatgctggcatgagcaccctgttcctggtgtacagcaacaagtgccagacccccctgggcatggcctctggccacatcagagacttccagatcacagcctcaggccagtatggccagtgggcccccaagctggccaggctgcactactctggcagcatcaatgcctggtccaccaaggagcccttcagctggatcaaggtggacctcctggcccccatgatcatccatggcatcaagacccagggggccaggcagaagttcagctccctgtacatctcccagttcatcatcatgtactccctggatggcaagaagtggcagacctacagaggcaacagcacaggcaccctgatggtgttctttggcaatgtggacagctctgggatcaagcacaacatcttcaacccccccatcattgccaggtacatcagactgcaccccacccactactccatcaggtccaccctgagaatggagctgatgggctgtgacctgaacagctgcagcatgcccctgggcatggagagcaaggccatctctgatgcccagatcacagccagcagctacttcaccaacatgtttgccacctggtcccccagcaaggccaggctgcacctgcagggcaggagcaatgcctggaggccccaggtgaacaaccccaaggagtggctgcaggtggacttccagaagaccatgaaggtgacaggggtgaccacccagggggtgaagtccctgctgaccagcatgtatgtgaaggagttcctgatcagcagctcccaggatggccaccagtggaccctgttcttccagaatggcaaggtgaaggtgttccagggcaaccaggacagcttcacccctgtggtgaactccctggacccccccctgctgaccagatacctgaggatccacccccagtcctgggtgcaccagattgccctgagaatggaggtgctgggctgtgaggcccaggacctgtactgattaattaagagcatcttaccgccatttattcccatatttgttctgtttttcttgatttgggtatacatttaaatgttaataaaacaaaatggtggggcaatcatttacatttttagggatatgtaattactagttcaggtgtattgccacaagacaaacatgttaagaaactttcccgttatttacgctctgttcctgttaatcaacctctggattacaaaatttgtgaaagattgactgatattcttaactatgttgctccttttacgctgtgtggatatgctgctttatagcctctgtatctagctattgcttcccgtacggctttcgttttctcctccttgtataaatcctggttgctgtctcttttagaggagttgtggcccgttgtccgtcaacgtggcgtggtgtgctctgtgtttgctgacgcaacccccactggctggggcattgccaccacctgtcaactcctttctgggactttcgctttccccctcccgatcgccacggcagaactcatcgccgcctgccttgcccgctgctggacaggggctaggttgctgggcactgataattccgtggtgttgtctgtgccttctagttgccagccatctgttgtttgcccctcccccgtgccttccttgaccctggaaggtgccactcccactgtcctttcctaataaaatgaggaaattgcatcgcattgtctgagtaggtgtcattctattctggggggtggggtggggcaggacagcaagggggaggattgggaagacaatagcaggcatgctggggatgcggtgggctctatggctctagagcatggctacgtagataagtagcatggcgggttaatcattaactacacctgcaggaggaacccctagtgatggagttggccactccctctctgcgcgctcgctcgctcactgaggccgggcgaccaaaggtcgcccgacgcccgggcggcctcagtgagcgagcgagcgcgcagctgcctgcagg

SEQ ID NO: 19 - DNA, 5998 bp, Artificial Sequence
  Description of Artificial Sequence: Synthetic polynucleotide
cctgcaggcagctgcgcgctcgctcgctcactgaggccgcccgggcaaagcccgggcgtcgggcgacctttggtcgcccggcctcagtgagcgagcgagcgcgcagagagggagtggccaactccatcactaggggttccttgtagttaatgattaacccgccatgctacttatctacgtagccatgctctagacgggggaggctgctggtgaatattaaccaaggtcaccccagttatcggaggagcaaacaggggctaagtccacacgcgtggtaccgtctgtctgcacatttcgtagagcgagtgttccgatactctaatctccctaggcaaggttcatatttgtgtaggttacttattctccttttgttgactaagtcaataatcagaatcagcaggtttggagtcagcttggcagggatcagcagcctgggttggaaggagggggtataaaagccccttcaccaggagaagccgtcacacagatccacaagctcctgaagaggtaagggtttaagggatggttggttggtggggtattaatgtttaattacctggagcacctgcctgaaatcactttttttcaggttggtttaaacgccgccaccatgaagtgggtcacctttatatccttactcttctcctcagcatactctgccaccaggagatactacctgggggctgtggagctgtcctgggactacatgcagtcagacctgggggagctgccagttgatgccaggttcccccccagagtccccaagtccttccccttcaacacctcagtggtgtacaaaaagaccctgtttgtggagttcacagaccacctgttcaacatagccaagcccaggcccccctggatgggcctgctgggccccaccatccaggcagaggtttatgacacagtggtcatcaccctgaagaacatggcctcccaccctgtgtccctccatgctgtgggggtgagctactggaaggccagtgagggggcagaatatgatgaccagaccagccagagggagaaggaggatgacaaggtgttcccagggggcagccacacctatgtgtggcaggtcctgaaggagaatggccccatggcctctgaccccctctgcctcacctactcctacctgtcccatgtggacctggtgaaggacctcaactctggcctgattggagccctcctggtgtgcagggaggggagcctggccaaggaaaagacccagaccctgcacaagtttatcctgctctttgcagtctttgatgaggggaagtcctggcacagtgagaccaagaactccctgatgcaggacagagatgctgcctcagccagggcctggcccaagatgcacacagtgaatgggtatgtcaacaggagcctgccaggcctgattgggtgccacagaaagtcagtgtactggcatgtcattggcatgggcaccaccccagaggtgcactccatcttcctggagggccacaccttcctggtgaggaaccacagacaggccagcctggagatcagcccaatcaccttcctcacagcccagaccctcctcatggacctgggccagtttctcctgttctgccacatctcctcccaccagcatgatggcatggaggcctatgtgaaggtggacagctgccctgaggagccccagctcaggatgaagaacaatgaggaggcagaggactatgatgatgatctgacagactctgagatggatgtggtgagatttgatgatgacaacagcccctccttcatccagatcaggtctgtggccaagaagcaccctaagacctgggtgcactacattgcagctgaggaggaggactgggactatgcccccctggtcctggcccctgatgataggtcctacaagtcccagtacctgaacaatggcccccagaggatagggagaaagtacaagaaggtgaggttcatggcctacactgatgagaccttcaagactagggaagccatccagcatgagtctgggatcctgggccccctcctctatggggaggtgggggacaccctgctgatcatcttcaagaaccaggccagcaggccctacaacatttacccccatgggatcacagatgtgagacccctgtacagcaggagactgccaaagggggtgaagcacctgaaggacttccccatcctgccaggggagatcttcaagtacaagtggactgtgacagtggaggatgggcccaccaaatctgaccctagatgcctgaccagatactacagcagctttgtgaacatggagagggacctggcctctggactgattggccctctgctgatctgctacaaggagagtgtggaccagaggggaaaccagatcatgtctgacaagaggaatgtgatcctgttctcagtgtttgatgagaacagatcctggtacctcactgagaacatccagaggttcctgcccaacccagcaggggtgcagctggaggacccagagttccaggcctccaacatcatgcactccatcaatggctatgtctttgactccctgcagctgtcagtgtgcctgcatgaggtggcctactggtacatcctctccattggagcccagactgacttcctgtcagtcttcttcagtggctacaccttcaagcacaagatggtctatgaggacactctgaccctgttccccttctctggggagactgtgttcatgtccatggagaaccctggactgtggatcctgggctgccacaacagtgacttcaggaacaggggcatgactgccctgctgaaggtctccagctgtgacaagaacactggggactactatgaggactcctatgaggacatctctgcctacctgctgtccaagaacaatgccattgagcccaggtccttctcccagaacagcagacacccctccaccaggcagaagcagttcaatgcaaccaccatccctgaaaataccaccctgcagagtgaccaggaggagattgactatgatgacaccatctctgtggagatgaagaaggaggactttgacatctatgatgaggatgagaaccagagccctagaagcttccagaagaagaccagacactacttcattgctgcagtggaaagactgtgggactatgggatgagctcctccccccatgtgctgaggaacagggcccagtctggctctgtgccccagttcaagaaggtggtgttccaggagttcactgatggctccttcacccagcccctgtacaggggagagctgaatgagcacctgggcctgctgggcccctacatcagggctgaggtggaggacaatatcatggtgaccttcagaaaccaggcctccagaccttactccttctacagcagcctgatctcctatgaggaggaccagagacagggggctgagcccaggaagaactttgtgaagcccaatgagaccaagacctacttctggaaggtgcagcaccacatggcccccaccaaggatgagtttgactgcaaggcctgggcctacttctctgatgtggacctggagaaggatgtgcactctggcctgattggccccctgctggtgtgccacaccaacaccctgaaccctgcccatggcaggcaggtgactgtgcaggagtttgccctgttcttcaccatctttgatgagaccaagagctggtacttcactgagaacatggagaggaactgcagggccccctgcaacatccagatggaggaccccaccttcaaggagaactacaggttccatgccatcaatggctacatcatggacaccctgcctggcctggtgatggcccaggaccagaggatcaggtggtacctgctgagcatggggagcaatgagaacatccacagcatccacttctctggccatgtgttcacagtgaggaagaaggaggagtacaagatggccctgtacaacctgtaccctggggtgtttgagacagtggagatgctgccctccaaggctggaatctggagggtggagtgcctgattggggagcacctgcatgctggcatgagcaccctgttcctggtgtacagcaacaagtgccagacccccctgggcatggcctctggccacatcagagacttccagatcacagcctcaggccagtatggccagtgggcccccaagctggccaggctgcactactctggcagcatcaatgcctggtccaccaaggagcccttcagctggatcaaggtggacctcctggcccccatgatcatccatggcatcaagacccagggggccaggcagaagttcagctccctgtacatctcccagttcatcatcatgtactccctggatggcaagaagtggcagacctacagaggcaacagcacaggcaccctgatggtgttctttggcaatgtggacagctctgggatcaagcacaacatcttcaacccccccatcattgccaggtacatcagactgcaccccacccactactccatcaggtccaccctgagaatggagctgatgggctgtgacctgaacagctgcagcatgcccctgggcatggagagcaaggccatctctgatgcccagatcacagccagcagctacttcaccaacatgtttgccacctggtcccccagcaaggccaggctgcacctgcagggcaggagcaatgcctggaggccccaggtgaacaaccccaaggagtggctgcaggtggacttccagaagaccatgaaggtgacaggggtgaccacccagggggtgaagtccctgctgaccagcatgtatgtgaaggagttcctgatcagcagctcccaggatggccaccagtggaccctgttcttccagaatggcaaggtgaaggtgttccagggcaaccaggacagcttcacccctgtggtgaactccctggacccccccctgctgaccagatacctgaggatccacccccagtcctgggtgcaccagattgccctgagaatggaggtgctgggctgtgaggcccaggacctgtactgattaattaagagcatcttaccgccatttattcccatatttgttctgtttttcttgatttgggtatacatttaaatgttaataaaacaaaatggtggggcaatcatttacatttttagggatatgtaattactagttcaggtgtattgccacaagacaaacatgttaagaaactttcccgttatttacgctctgttcctgttaatcaacctctggattacaaaatttgtgaaagattgactgatattcttaactatgttgctccttttacgctgtgtggatatgctgctttatagcctctgtatctagctattgcttcccgtacggctttcgttttctcctccttgtataaatcctggttgctgtctcttttagaggagttgtggcccgttgtccgtcaacgtggcgtggtgtgctctgtgtttgctgacgcaacccccactggctggggcattgccaccacctgtcaactcctttctgggactttcgctttccccctcccgatcgccacggcagaactcatcgccgcctgccttgcccgctgctggacaggggctaggttgctgggcactgataattccgtggtgttgtctgtgccttctagttgccagccatctgttgtttgcccctcccccgtgccttccttgaccctggaaggtgccactcccactgtcctttcctaataaaatgaggaaattgcatcgcattgtctgagtaggtgtcattctattctggggggtggggtggggcaggacagcaagggggaggattgggaagacaatagcaggcatgctggggatgcggtgggctctatggctctagagcatggctacgtagataagtagcatggcgggttaatcattaactacacctgcaggaggaacccctagtgatggagttggccactccctctctgcgcgctcgctcgctcactgaggccgggcgaccaaaggtcgcccgacgcccgggcggcctcagtgagcgagcgagcgcgcagctgcctgcagg

SEQ ID NO: 20 - DNA, 6001 bp, Artificial Sequence
  Description of Artificial Sequence: Synthetic polynucleotide
cctgcaggcagctgcgcgctcgctcgctcactgaggccgcccgggcaaagcccgggcgtcgggcgacctttggtcgcccggcctcagtgagcgagcgagcgcgcagagagggagtggccaactccatcactaggggttccttgtagttaatgattaacccgccatgctacttatctacgtagccatgctctagacgggggaggctgctggtgaatattaaccaaggtcaccccagttatcggaggagcaaacaggggctaagtccacacgcgtggtaccgtctgtctgcacatttcgtagagcgagtgttccgatactctaatctccctaggcaaggttcatatttgtgtaggttacttattctccttttgttgactaagtcaataatcagaatcagcaggtttggagtcagcttggcagggatcagcagcctgggttggaaggagggggtataaaagccccttcaccaggagaagccgtcacacagatccacaagctcctgaagaggtaagggtttaagggatggttggttggtggggtattaatgtttaattacctggagcacctgcctgaaatcactttttttcaggttggtttaaacgccgccaccatgggggtgaaagttctgtttgctctcatctgtattgctgtggctgaagctgccaccaggagatactacctgggggctgtggagctgtcctgggactacatgcagtcagacctgggggagctgccagttgatgccaggttcccccccagagtccccaagtccttccccttcaacacctcagtggtgtacaaaaagaccctgtttgtggagttcacagaccacctgttcaacatagccaagcccaggcccccctggatgggcctgctgggccccaccatccaggcagaggtttatgacacagtggtcatcaccctgaagaacatggcctcccaccctgtgtccctccatgctgtgggggtgagctactggaaggccagtgagggggcagaatatgatgaccagaccagccagagggagaaggaggatgacaaggtgttcccagggggcagccacacctatgtgtggcaggtcctgaaggagaatggccccatggcctctgaccccctctgcctcacctactcctacctgtcccatgtggacctggtgaaggacctcaactctggcctgattggagccctcctggtgtgcagggaggggagcctggccaaggaaaagacccagaccctgcacaagtttatcctgctctttgcagtctttgatgaggggaagtcctggcacagtgagaccaagaactccctgatgcaggacagagatgctgcctcagccagggcctggcccaagatgcacacagtgaatgggtatgtcaacaggagcctgccaggcctgattgggtgccacagaaagtcagtgtactggcatgtcattggcatgggcaccaccccagaggtgcactccatcttcctggagggccacaccttcctggtgaggaaccacagacaggccagcctggagatcagcccaatcaccttcctcacagcccagaccctcctcatggacctgggccagtttctcctgttctgccacatctcctcccaccagcatgatggcatggaggcctatgtgaaggtggacagctgccctgaggagccccagctcaggatgaagaacaatgaggaggcagaggactatgatgatgatctgacagactctgagatggatgtggtgagatttgatgatgacaacagcccctccttcatccagatcaggtctgtggccaagaagcaccctaagacctgggtgcactacattgcagctgaggaggaggactgggactatgcccccctggtcctggcccctgatgataggtcctacaagtcccagtacctgaacaatggcccccagaggatagggagaaagtacaagaaggtgaggttcatggcctacactgatgagaccttcaagactagggaagccatccagcatgagtctgggatcctgggccccctcctctatggggaggtgggggacaccctgctgatcatcttcaagaaccaggccagcaggccctacaacatttacccccatgggatcacagatgtgagacccctgtacagcaggagactgccaaagggggtgaagcacctgaaggacttccccatcctgccaggggagatcttcaagtacaagtggactgtgacagtggaggatgggcccaccaaatctgaccctagatgcctgaccagatactacagcagctttgtgaacatggagagggacctggcctctggactgattggccctctgctgatctgctacaaggagagtgtggaccagaggggaaaccagatcatgtctgacaagaggaatgtgatcctgttctcagtgtttgatgagaacagatcctggtacctcactgagaacatccagaggttcctgcccaacccagcaggggtgcagctggaggacccagagttccaggcctccaacatcatgcactccatcaatggctatgtctttgactccctgcagctgtcagtgtgcctgcatgaggtggcctactggtacatcctctccattggagcccagactgacttcctgtcagtcttcttcagtggctacaccttcaagcacaagatggtctatgaggacactctgaccctgttccccttctctggggagactgtgttcatgtccatggagaaccctggactgtggatcctgggctgccacaacagtgacttcaggaacaggggcatgactgccctgctgaaggtctccagctgtgacaagaacactggggactactatgaggactcctatgaggacatctctgcctacctgctgtccaagaacaatgccattgagcccaggtccttctcccagaacagcagacacccctccaccaggcagaagcagttcaatgcaaccaccatccctgaaaataccaccctgcagagtgaccaggaggagattgactatgatgacaccatctctgtggagatgaagaaggaggactttgacatctatgatgaggatgagaaccagagccctagaagcttccagaagaagaccagacactacttcattgctgcagtggaaagactgtgggactatgggatgagctcctccccccatgtgctgaggaacagggcccagtctggctctgtgccccagttcaagaaggtggtgttccaggagttcactgatggctccttcacccagcccctgtacaggggagagctgaatgagcacctgggcctgctgggcccctacatcagggctgaggtggaggacaatatcatggtgaccttcagaaaccaggcctccagaccttactccttctacagcagcctgatctcctatgaggaggaccagagacagggggctgagcccaggaagaactttgtgaagcccaatgagaccaagacctacttctggaaggtgcagcaccacatggcccccaccaaggatgagtttgactgcaaggcctgggcctacttctctgatgtggacctggagaaggatgtgcactctggcctgattggccccctgctggtgtgccacaccaacaccctgaaccctgcccatggcaggcaggtgactgtgcaggagtttgccctgttcttcaccatctttgatgagaccaagagctggtacttcactgagaacatggagaggaactgcagggccccctgcaacatccagatggaggaccccaccttcaaggagaactacaggttccatgccatcaatggctacatcatggacaccctgcctggcctggtgatggcccaggaccagaggatcaggtggtacctgctgagcatggggagcaatgagaacatccacagcatccacttctctggccatgtgttcacagtgaggaagaaggaggagtacaagatggccctgtacaacctgtaccctggggtgtttgagacagtggagatgctgccctccaaggctggaatctggagggtggagtgcctgattggggagcacctgcatgctggcatgagcaccctgttcctggtgtacagcaacaagtgccagacccccctgggcatggcctctggccacatcagagacttccagatcacagcctcaggccagtatggccagtgggcccccaagctggccaggctgcactactctggcagcatcaatgcctggtccaccaaggagcccttcagctggatcaaggtggacctcctggcccccatgatcatccatggcatcaagacccagggggccaggcagaagttcagctccctgtacatctcccagttcatcatcatgtactccctggatggcaagaagtggcagacctacagaggcaacagcacaggcaccctgatggtgttctttggcaatgtggacagctctgggatcaagcacaacatcttcaacccccccatcattgccaggtacatcagactgcaccccacccactactccatcaggtccaccctgagaatggagctgatgggctgtgacctgaacagctgcagcatgcccctgggcatggagagcaaggccatctctgatgcccagatcacagccagcagctacttcaccaacatgtttgccacctggtcccccagcaaggccaggctgcacctgcagggcaggagcaatgcctggaggccccaggtgaacaaccccaaggagtggctgcaggtggacttccagaagaccatgaaggtgacaggggtgaccacccagggggtgaagtccctgctgaccagcatgtatgtgaaggagttcctgatcagcagctcccaggatggccaccagtggaccctgttcttccagaatggcaaggtgaaggtgttccagggcaaccaggacagcttcacccctgtggtgaactccctggacccccccctgctgaccagatacctgaggatccacccccagtcctgggtgcaccagattgccctgagaatggaggtgctgggctgtgaggcccaggacctgtactgattaattaagagcatcttaccgccatttattcccatatttgttctgtttttcttgatttgggtatacatttaaatgttaataaaacaaaatggtggggcaatcatttacatttttagggatatgtaattactagttcaggtgtattgccacaagacaaacatgttaagaaactttcccgttatttacgctctgttcctgttaatcaacctctggattacaaaatttgtgaaagattgactgatattcttaactatgttgctccttttacgctgtgtggatatgctgctttatagcctctgtatctagctattgcttcccgtacggctttcgttttctcctccttgtataaatcctggttgctgtctcttttagaggagttgtggcccgttgtccgtcaacgtggcgtggtgtgctctgtgtttgctgacgcaacccccactggctggggcattgccaccacctgtcaactcctttctgggactttcgctttccccctcccgatcgccacggcagaactcatcgccgcctgccttgcccgctgctggacaggggctaggttgctgggcactgataattccgtggtgttgtctgtgccttctagttgccagccatctgttgtttgcccctcccccgtgccttccttgaccctggaaggtgccactcccactgtcctttcctaataaaatgaggaaattgcatcgcattgtctgagtaggtgtcattctattctggggggtggggtggggcaggacagcaagggggaggattgggaagacaatagcaggcatgctggggatgcggtgggctctatggctctagagcatggctacgtagataagtagcatggcgggttaatcattaactacacctgcaggaggaacccctagtgatggagttggccactccctctctgcgcgctcgctcgctcactgaggccgggcgaccaaaggtcgcccgacgcccgggcggcctcagtgagcgagcgagcgcgcagctgcctgcagg

SEQ ID NO: 21 - DNA, 6013 bp, Artificial Sequence
  Description of Artificial Sequence: Synthetic polynucleotide
cctgcaggcagctgcgcgctcgctcgctcactgaggccgcccgggcaaagcccgggcgtcgggcgacctttggtcgcccggcctcagtgagcgagcgagcgcgcagagagggagtggccaactccatcactaggggttccttgtagttaatgattaacccgccatgctacttatctacgtagccatgctctagacgggggaggctgctggtgaatattaaccaaggtcaccccagttatcggaggagcaaacaggggctaagtccacacgcgtggtaccgtctgtctgcacatttcgtagagcgagtgttccgatactctaatctccctaggcaaggttcatatttgtgtaggttacttattctccttttgttgactaagtcaataatcagaatcagcaggtttggagtcagcttggcagggatcagcagcctgggttggaaggagggggtataaaagccccttcaccaggagaagccgtcacacagatccacaagctcctgaagaggtaagggtttaagggatggttggttggtggggtattaatgtttaattacctggagcacctgcctgaaatcactttttttcaggttggtttaaacgccgccaccatgtggtggaggctgtggtggttactactgcttctgctcctgttatggccaatggtctgggctgccaccaggagatactacctgggggctgtggagctgtcctgggactacatgcagtcagacctgggggagctgccagttgatgccaggttcccccccagagtccccaagtccttccccttcaacacctcagtggtgtacaaaaagaccctgtttgtggagttcacagaccacctgttcaacatagccaagcccaggcccccctggatgggcctgctgggccccaccatccaggcagaggtttatgacacagtggtcatcaccctgaagaacatggcctcccaccctgtgtccctccatgctgtgggggtgagctactggaaggccagtgagggggcagaatatgatgaccagaccagccagagggagaaggaggatgacaaggtgttcccagggggcagccacacctatgtgtggcaggtcctgaaggagaatggccccatggcctctgaccccctctgcctcacctactcctacctgtcccatgtggacctggtgaaggacctcaactctggcctgattggagccctcctggtgtgcagggaggggagcctggccaaggaaaagacccagaccctgcacaagtttatcctgctctttgcagtctttgatgaggggaagtcctggcacagtgagaccaagaactccctgatgcaggacagagatgctgcctcagccagggcctggcccaagatgcacacagtgaatgggtatgtcaacaggagcctgccaggcctgattgggtgccacagaaagtcagtgtactggcatgtcattggcatgggcaccaccccagaggtgcactccatcttcctggagggccacaccttcctggtgaggaaccacagacaggccagcctggagatcagcccaatcaccttcctcacagcccagaccctcctcatggacctgggccagtttctcctgttctgccacatctcctcccaccagcatgatggcatggaggcctatgtgaaggtggacagctgccctgaggagccccagctcaggatgaagaacaatgaggaggcagaggactatgatgatgatctgacagactctgagatggatgtggtgagatttgatgatgacaacagcccctccttcatccagatcaggtctgtggccaagaagcaccctaagacctgggtgcactacattgcagctgaggaggaggactgggactatgcccccctggtcctggcccctgatgataggtcctacaagtcccagtacctgaacaatggcccccagaggatagggagaaagtacaagaaggtgaggttcatggcctacactgatgagaccttcaagactagggaagccatccagcatgagtctgggatcctgggccccctcctctatggggaggtgggggacaccctgctgatcatcttcaagaaccaggccagcaggccctacaacatttacccccatgggatcacagatgtgagacccctgtacagcaggagactgccaaagggggtgaagcacctgaaggacttccccatcctgccaggggagatcttcaagtacaagtggactgtgacagtggaggatgggcccaccaaatctgaccctagatgcctgaccagatactacagcagctttgtgaacatggagagggacctggcctctggactgattggccctctgctgatctgctacaaggagagtgtggaccagaggggaaaccagatcatgtctgacaagaggaatgtgatcctgttctcagtgtttgatgagaacagatcctggtacctcactgagaacatccagaggttcctgcccaacccagcaggggtgcagctggaggacccagagttccaggcctccaacatcatgcactccatcaatggctatgtctttgactccctgcagctgtcagtgtgcctgcatgaggtggcctactggtacatcctctccattggagcccagactgacttcctgtcagtcttcttcagtggctacaccttcaagcacaagatggtctatgaggacactctgaccctgttccccttctctggggagactgtgttcatgtccatggagaaccctggactgtggatcctgggctgccacaacagtgacttcaggaacaggggcatgactgccctgctgaaggtctccagctgtgacaagaacactggggactactatgaggactcctatgaggacatctctgcctacctgctgtccaagaacaatgccattgagcccaggtccttctcccagaacagcagacacccctccaccaggcagaagcagttcaatgcaaccaccatccctgaaaataccaccctgcagagtgaccaggaggagattgactatgatgacaccatctctgtggagatgaagaaggaggactttgacatctatgatgaggatgagaaccagagccctagaagcttccagaagaagaccagacactacttcattgctgcagtggaaagactgtgggactatgggatgagctcctccccccatgtgctgaggaacagggcccagtctggctctgtgccccagttcaagaaggtggtgttccaggagttcactgatggctccttcacccagcccctgtacaggggagagctgaatgagcacctgggcctgctgggcccctacatcagggctgaggtggaggacaatatcatggtgaccttcagaaaccaggcctccagaccttactccttctacagcagcctgatctcctatgaggaggaccagagacagggggctgagcccaggaagaactttgtgaagcccaatgagaccaagacctacttctggaaggtgcagcaccacatggcccccaccaaggatgagtttgactgcaaggcctgggcctacttctctgatgtggacctggagaaggatgtgcactctggcctgattggccccctgctggtgtgccacaccaacaccctgaaccctgcccatggcaggcaggtgactgtgcaggagtttgccctgttcttcaccatctttgatgagaccaagagctggtacttcactgagaacatggagaggaactgcagggccccctgcaacatccagatggaggaccccaccttcaaggagaactacaggttccatgccatcaatggctacatcatggacaccctgcctggcctggtgatggcccaggaccagaggatcaggtggtacctgctgagcatggggagcaatgagaacatccacagcatccacttctctggccatgtgttcacagtgaggaagaaggaggagtacaagatggccctgtacaacctgtaccctggggtgtttgagacagtggagatgctgccctccaaggctggaatctggagggtggagtgcctgattggggagcacctgcatgctggcatgagcaccctgttcctggtgtacagcaacaagtgccagacccccctgggcatggcctctggccacatcagagacttccagatcacagcctcaggccagtatggccagtgggcccccaagctggccaggctgcactactctggcagcatcaatgcctggtccaccaaggagcccttcagctggatcaaggtggacctcctggcccccatgatcatccatggcatcaagacccagggggccaggcagaagttcagctccctgtacatctcccagttcatcatcatgtactccctggatggcaagaagtggcagacctacagaggcaacagcacaggcaccctgatggtgttctttggcaatgtggacagctctgggatcaagcacaacatcttcaacccccccatcattgccaggtacatcagactgcaccccacccactactccatcaggtccaccctgagaatggagctgatgggctgtgacctgaacagctgcagcatgcccctgggcatggagagcaaggccatctctgatgcccagatcacagccagcagctacttcaccaacatgtttgccacctggtcccccagcaaggccaggctgcacctgcagggcaggagcaatgcctggaggccccaggtgaacaaccccaaggagtggctgcaggtggacttccagaagaccatgaaggtgacaggggtgaccacccagggggtgaagtccctgctgaccagcatgtatgtgaaggagttcctgatcagcagctcccaggatggccaccagtggaccctgttcttccagaatggcaaggtgaaggtgttccagggcaaccaggacagcttcacccctgtggtgaactccctggacccccccctgctgaccagatacctgaggatccacccccagtcctgggtgcaccagattgccctgagaatggaggtgctgggctgtgaggcccaggacctgtactgattaattaagagcatcttaccgccatttattcccatatttgttctgtttttcttgatttgggtatacatttaaatgttaataaaacaaaatggtggggcaatcatttacatttttagggatatgtaattactagttcaggtgtattgccacaagacaaacatgttaagaaactttcccgttatttacgctctgttcctgttaatcaacctctggattacaaaatttgtgaaagattgactgatattcttaactatgttgctccttttacgctgtgtggatatgctgctttatagcctctgtatctagctattgcttcccgtacggctttcgttttctcctccttgtataaatcctggttgctgtctcttttagaggagttgtggcccgttgtccgtcaacgtggcgtggtgtgctctgtgtttgctgacgcaacccccactggctggggcattgccaccacctgtcaactcctttctgggactttcgctttccccctcccgatcgccacggcagaactcatcgccgcctgccttgcccgctgctggacaggggctaggttgctgggcactgataattccgtggtgttgtctgtgccttctagttgccagccatctgttgtttgcccctcccccgtgccttccttgaccctggaaggtgccactcccactgtcctttcctaataaaatgaggaaattgcatcgcattgtctgagtaggtgtcattctattctggggggtggggtggggcaggacagcaagggggaggattgggaagacaatagcaggcatgctggggatgcggtgggctctatggctctagagcatggctacgtagataagtagcatggcgggttaatcattaactacacctgcaggaggaacccctagtgatggagttggccactccctctctgcgcgctcgctcgctcactgaggccgggcgaccaaaggtcgcccgacgcccgggcggcctcagtgagcgagcgagcgcgcagctgcctgcagg

SEQ ID NO: 22 - DNA, 5998 bp, Artificial Sequence
  Description of Artificial Sequence: Synthetic polynucleotide
cctgcaggcagctgcgcgctcgctcgctcactgaggccgcccgggcaaagcccgggcgtcgggcgacctttggtcgcccggcctcagtgagcgagcgagcgcgcagagagggagtggccaactccatcactaggggttccttgtagttaatgattaacccgccatgctacttatctacgtagccatgctctagacgggggaggctgctggtgaatattaaccaaggtcaccccagttatcggaggagcaaacaggggctaagtccacacgcgtggtaccgtctgtctgcacatttcgtagagcgagtgttccgatactctaatctccctaggcaaggttcatatttgtgtaggttacttattctccttttgttgactaagtcaataatcagaatcagcaggtttggagtcagcttggcagggatcagcagcctgggttggaaggagggggtataaaagccccttcaccaggagaagccgtcacacagatccacaagctcctgaagaggtaagggtttaagggatggttggttggtggggtattaatgtttaattacctggagcacctgcctgaaatcactttttttcaggttggtttaaacgccgccaccatgccattactgctactgttaccactactttgggctggtgcacttgctgccaccaggagatactacctgggggctgtggagctgtcctgggactacatgcagtcagacctgggggagctgccagttgatgccaggttcccccccagagtccccaagtccttccccttcaacacctcagtggtgtacaaaaagaccctgtttgtggagttcacagaccacctgttcaacatagccaagcccaggcccccctggatgggcctgctgggccccaccatccaggcagaggtttatgacacagtggtcatcaccctgaagaacatggcctcccaccctgtgtccctccatgctgtgggggtgagctactggaaggccagtgagggggcagaatatgatgaccagaccagccagagggagaaggaggatgacaaggtgttcccagggggcagccacacctatgtgtggcaggtcctgaaggagaatggccccatggcctctgaccccctctgcctcacctactcctacctgtcccatgtggacctggtgaaggacctcaactctggcctgattggagccctcctggtgtgcagggaggggagcctggccaaggaaaagacccagaccctgcacaagtttatcctgctctttgcagtctttgatgaggggaagtcctggcacagtgagaccaagaactccctgatgcaggacagagatgctgcctcagccagggcctggcccaagatgcacacagtgaatgggtatgtcaacaggagcctgccaggcctgattgggtgccacagaaagtcagtgtactggcatgtcattggcatgggcaccaccccagaggtgcactccatcttcctggagggccacaccttcctggtgaggaaccacagacaggccagcctggagatcagcccaatcaccttcctcacagcccagaccctcctcatggacctgggccagtttctcctgttctgccacatctcctcccaccagcatgatggcatggaggcctatgtgaaggtggacagctgccctgaggagccccagctcaggatgaagaacaatgaggaggcagaggactatgatgatgatctgacagactctgagatggatgtggtgagatttgatgatgacaacagcccctccttcatccagatcaggtctgtggccaagaagcaccctaagacctgggtgcactacattgcagctgaggaggaggactgggactatgcccccctggtcctggcccctgatgataggtcctacaagtcccagtacctgaacaatggcccccagaggatagggagaaagtacaagaaggtgaggttcatggcctacactgatgagaccttcaagactagggaagccatccagcatgagtctgggatcctgggccccctcctctatggggaggtgggggacaccctgctgatcatcttcaagaaccaggccagcaggccctacaacatttacccccatgggatcacagatgtgagacccctgtacagcaggagactgccaaagggggtgaagcacctgaaggacttccccatcctgccaggggagatcttcaagtacaagtggactgtgacagtggaggatgggcccaccaaatctgaccctagatgcctgaccagatactacagcagctttgtgaacatggagagggacctggcctctggactgattggccctctgctgatctgctacaaggagagtgtggaccagaggggaaaccagatcatgtctgacaagaggaatgtgatcctgttctcagtgtttgatgagaacagatcctggtacctcactgagaacatccagaggttcctgcccaacccagcaggggtgcagctggaggacccagagttccaggcctccaacatcatgcactccatcaatggctatgtctttgactccctgcagctgtcagtgtgcctgcatgaggtggcctactggtacatcctctccattggagcccagactgacttcctgtcagtcttcttcagtggctacaccttcaagcacaagatggtctatgaggacactctgaccctgttccccttctctggggagactgtgttcatgtccatggagaaccctggactgtggatcctgggctgccacaacagtgacttcaggaacaggggcatgactgccctgctgaaggtctccagctgtgacaagaacactggggactactatgaggactcctatgaggacatctctgcctacctgctgtccaagaacaatgccattgagcccaggtccttctcccagaacagcagacacccctccaccaggcagaagcagttcaatgcaaccaccatccctgaaaataccaccctgcagagtgaccaggaggagattgactatgatgacaccatctctgtggagatgaagaaggaggactttgacatctatgatgaggatgagaaccagagccctagaagcttccagaagaagaccagacactacttcattgctgcagtggaaagactgtgggactatgggatgagctcctccccccatgtgctgaggaacagggcccagtctggctctgtgccccagttcaagaaggtggtgttccaggagttcactgatggctccttcacccagcccctgtacaggggagagctgaatgagcacctgggcctgctgggcccctacatcagggctgaggtggaggacaatatcatggtgaccttcagaaaccaggcctccagaccttactccttctacagcagcctgatctcctatgaggaggaccagagacagggggctgagcccaggaagaactttgtgaagcccaatgagaccaagacctacttctggaaggtgcagcaccacatggcccccaccaaggatgagtttgactgcaaggcctgggcctacttctctgatgtggacctggagaaggatgtgcactctggcctgattggccccctgctggtgtgccacaccaacaccctgaaccctgcccatggcaggcaggtgactgtgcaggagtttgccctgttcttcaccatctttgatgagaccaagagctggtacttcactgagaacatggagaggaactgcagggccccctgcaacatccagatggaggaccccaccttcaaggagaactacaggttccatgccatcaatggctacatcatggacaccctgcctggcctggtgatggcccaggaccagaggatcaggtggtacctgctgagcatggggagcaatgagaacatccacagcatccacttctctggccatgtgttcacagtgaggaagaaggaggagtacaagatggccctgtacaacctgtaccctggggtgtttgagacagtggagatgctgccctccaaggctggaatctggagggtggagtgcctgattggggagcacctgcatgctggcatgagcaccctgttcctggtgtacagcaacaagtgccagacccccctgggcatggcctctggccacatcagagacttccagatcacagcctcaggccagtatggccagtgggcccccaagctggccaggctgcactactctggcagcatcaatgcctggtccaccaaggagcccttcagctggatcaaggtggacctcctggcccccatgatcatccatggcatcaagacccagggggccaggcagaagttcagctccctgtacatctcccagttcatcatcatgtactccctggatggcaagaagtggcagacctacagaggcaacagcacaggcaccctgatggtgttctttggcaatgtggacagctctgggatcaagcacaacatcttcaacccccccatcattgccaggtacatcagactgcaccccacccactactccatcaggtccaccctgagaatggagctgatgggctgtgacctgaacagctgcagcatgcccctgggcatggagagcaaggccatctctgatgcccagatcacagccagcagctacttcaccaacatgtttgccacctggtcccccagcaaggccaggctgcacctgcagggcaggagcaatgcctggaggccccaggtgaacaaccccaaggagtggctgcaggtggacttccagaagaccatgaaggtgacaggggtgaccacccagggggtgaagtccctgctgaccagcatgtatgtgaaggagttcctgatcagcagctcccaggatggccaccagtggaccctgttcttccagaatggcaaggtgaaggtgttccagggcaaccaggacagcttcacccctgtggtgaactccctggacccccccctgctgaccagatacctgaggatccacccccagtcctgggtgcaccagattgccctgagaatggaggtgctgggctgtgaggcccaggacctgtactgattaattaagagcatcttaccgccatttattcccatatttgttctgtttttcttgatttgggtatacatttaaatgttaataaaacaaaatggtggggcaatcatttacatttttagggatatgtaattactagttcaggtgtattgccacaagacaaacatgttaagaaactttcccgttatttacgctctgttcctgttaatcaacctctggattacaaaatttgtgaaagattgactgatattcttaactatgttgctccttttacgctgtgtggatatgctgctttatagcctctgtatctagctattgcttcccgtacggctttcgttttctcctccttgtataaatcctggttgctgtctcttttagaggagttgtggcccgttgtccgtcaacgtggcgtggtgtgctctgtgtttgctgacgcaacccccactggctggggcattgccaccacctgtcaactcctttctgggactttcgctttccccctcccgatcgccacggcagaactcatcgccgcctgccttgcccgctgctggacaggggctaggttgctgggcactgataattccgtggtgttgtctgtgccttctagttgccagccatctgttgtttgcccctcccccgtgccttccttgaccctggaaggtgccactcccactgtcctttcctaataaaatgaggaaattgcatcgcattgtctgagtaggtgtcattctattctggggggtggggtggggcaggacagcaagggggaggattgggaagacaatagcaggcatgctggggatgcggtgggctctatggctctagagcatggctacgtagataagtagcatggcgggttaatcattaactacacctgcaggaggaacccctagtgatggagttggccactccctctctgcgcgctcgctcgctcactgaggccgggcgaccaaaggtcgcccgacgcccgggcggcctcagtgagcgagcgagcgcgcagctgcctgcagg

SEQ ID NO: 23 - DNA, 6001 bp, Artificial Sequence
  Description of Artificial Sequence: Synthetic polynucleotide
cctgcaggcagctgcgcgctcgctcgctcactgaggccgcccgggcaaagcccgggcgtcgggcgacctttggtcgcccggcctcagtgagcgagcgagcgcgcagagagggagtggccaactccatcactaggggttccttgtagttaatgattaacccgccatgctacttatctacgtagccatgctctagacgggggaggctgctggtgaatattaaccaaggtcaccccagttatcggaggagcaaacaggggctaagtccacacgcgtggtaccgtctgtctgcacatttcgtagagcgagtgttccgatactctaatctccctaggcaaggttcatatttgtgtaggttacttattctccttttgttgactaagtcaataatcagaatcagcaggtttggagtcagcttggcagggatcagcagcctgggttggaaggagggggtataaaagccccttcaccaggagaagccgtcacacagatccacaagctcctgaagaggtaagggtttaagggatggttggttggtggggtattaatgtttaattacctggagcacctgcctgaaatcactttttttcaggttggtttaaacgccgccaccatgggggtgaaggtgctgtttgccctgatctgcattgctgtggctgaggctgccaccaggagatactacctgggggctgtggagctgtcctgggactacatgcagtcagacctgggggagctgccagttgatgccaggttcccccccagagtccccaagtccttccccttcaacacctcagtggtgtacaaaaagaccctgtttgtggagttcacagaccacctgttcaacatagccaagcccaggcccccctggatgggcctgctgggccccaccatccaggcagaggtttatgacacagtggtcatcaccctgaagaacatggcctcccaccctgtgtccctccatgctgtgggggtgagctactggaaggccagtgagggggcagaatatgatgaccagaccagccagagggagaaggaggatgacaaggtgttcccagggggcagccacacctatgtgtggcaggtcctgaaggagaatggccccatggcctctgaccccctctgcctcacctactcctacctgtcccatgtggacctggtgaaggacctcaactctggcctgattggagccctcctggtgtgcagggaggggagcctggccaaggaaaagacccagaccctgcacaagtttatcctgctctttgcagtctttgatgaggggaagtcctggcacagtgagaccaagaactccctgatgcaggacagagatgctgcctcagccagggcctggcccaagatgcacacagtgaatgggtatgtcaacaggagcctgccaggcctgattgggtgccacagaaagtcagtgtactggcatgtcattggcatgggcaccaccccagaggtgcactccatcttcctggagggccacaccttcctggtgaggaaccacagacaggccagcctggagatcagcccaatcaccttcctcacagcccagaccctcctcatggacctgggccagtttctcctgttctgccacatctcctcccaccagcatgatggcatggaggcctatgtgaaggtggacagctgccctgaggagccccagctcaggatgaagaacaatgaggaggcagaggactatgatgatgatctgacagactctgagatggatgtggtgagatttgatgatgacaacagcccctccttcatccagatcaggtctgtggccaagaagcaccctaagacctgggtgcactacattgcagctgaggaggaggactgggactatgcccccctggtcctggcccctgatgataggtcctacaagtcccagtacctgaacaatggcccccagaggatagggagaaagtacaagaaggtgaggttcatggcctacactgatgagaccttcaagactagggaagccatccagcatgagtctgggatcctgggccccctcctctatggggaggtgggggacaccctgctgatcatcttcaagaaccaggccagcaggccctacaacatttacccccatgggatcacagatgtgagacccctgtacagcaggagactgccaaagggggtgaagcacctgaaggacttccccatcctgccaggggagatcttcaagtacaagtggactgtgacagtggaggatgggcccaccaaatctgaccctagatgcctgaccagatactacagcagctttgtgaacatggagagggacctggcctctggactgattggccctctgctgatctgctacaaggagagtgtggaccagaggggaaaccagatcatgtctgacaagaggaatgtgatcctgttctcagtgtttgatgagaacagatcctggtacctcactgagaacatccagaggttcctgcccaacccagcaggggtgcagctggaggacccagagttccaggcctccaacatcatgcactccatcaatggctatgtctttgactccctgcagctgtcagtgtgcctgcatgaggtggcctactggtacatcctctccattggagcccagactgacttcctgtcagtcttcttcagtggctacaccttcaagcacaagatggtctatgaggacactctgaccctgttccccttctctggggagactgtgttcatgtccatggagaaccctggactgtggatcctgggctgccacaacagtgacttcaggaacaggggcatgactgccctgctgaaggtctccagctgtgacaagaacactggggactactatgaggactcctatgaggacatctctgcctacctgctgtccaagaacaatgccattgagcccaggtccttctcccagaacagcagacacccctccaccaggcagaagcagttcaatgcaaccaccatccctgaaaataccaccctgcagagtgaccaggaggagattgactatgatgacaccatctctgtggagatgaagaaggaggactttgacatctatgatgaggatgagaaccagagccctagaagcttccagaagaagaccagacactacttcattgctgcagtggaaagactgtgggactatgggatgagctcctccccccatgtgctgaggaacagggcccagtctggctctgtgccccagttcaagaaggtggtgttccaggagttcactgatggctccttcacccagcccctgtacaggggagagctgaatgagcacctgggcctgctgggcccctacatcagggctgaggtggaggacaatatcatggtgaccttcagaaaccaggcctccagaccttactccttctacagcagcctgatctcctatgaggaggaccagagacagggggctgagcccaggaagaactttgtgaagcccaatgagaccaagacctacttctggaaggtgcagcaccacatggcccccaccaaggatgagtttgactgcaaggcctgggcctacttctctgatgtggacctggagaaggatgtgcactctggcctgattggccccctgctggtgtgccacaccaacaccctgaaccctgcccatggcaggcaggtgactgtgcaggagtttgccctgttcttcaccatctttgatgagaccaagagctggtacttcactgagaacatggagaggaactgcagggccccctgcaacatccagatggaggaccccaccttcaaggagaactacaggttccatgccatcaatggctacatcatggacaccctgcctggcctggtgatggcccaggaccagaggatcaggtggtacctgctgagcatggggagcaatgagaacatccacagcatccacttctctggccatgtgttcacagtgaggaagaaggaggagtacaagatggccctgtacaacctgtaccctggggtgtttgagacagtggagatgctgccctccaaggctggaatctggagggtggagtgcctgattggggagcacctgcatgctggcatgagcaccctgttcctggtgtacagcaacaagtgccagacccccctgggcatggcctctggccacatcagagacttccagatcacagcctcaggccagtatggccagtgggcccccaagctggccaggctgcactactctggcagcatcaatgcctggtccaccaaggagcccttcagctggatcaaggtggacctcctggcccccatgatcatccatggcatcaagacccagggggccaggcagaagttcagctccctgtacatctcccagttcatcatcatgtactccctggatggcaagaagtggcagacctacagaggcaacagcacaggcaccctgatggtgttctttggcaatgtggacagctctgggatcaagcacaacatcttcaacccccccatcattgccaggtacatcagactgcaccccacccactactccatcaggtccaccctgagaatggagctgatgggctgtgacctgaacagctgcagcatgcccctgggcatggagagcaaggccatctctgatgcccagatcacagccagcagctacttcaccaacatgtttgccacctggtcccccagcaaggccaggctgcacctgcagggcaggagcaatgcctggaggccccaggtgaacaaccccaaggagtggctgcaggtggacttccagaagaccatgaaggtgacaggggtgaccacccagggggtgaagtccctgctgaccagcatgtatgtgaaggagttcctgatcagcagctcccaggatggccaccagtggaccctgttcttccagaatggcaaggtgaaggtgttccagggcaaccaggacagcttcacccctgtggtgaactccctggacccccccctgctgaccagatacctgaggatccacccccagtcctgggtgcaccagattgccctgagaatggaggtgctgggctgtgaggcccaggacctgtactgattaattaagagcatcttaccgccatttattcccatatttgttctgtttttcttgatttgggtatacatttaaatgttaataaaacaaaatggtggggcaatcatttacatttttagggatatgtaattactagttcaggtgtattgccacaagacaaacatgttaagaaactttcccgttatttacgctctgttcctgttaatcaacctctggattacaaaatttgtgaaagattgactgatattcttaactatgttgctccttttacgctgtgtggatatgctgctttatagcctctgtatctagctattgcttcccgtacggctttcgttttctcctccttgtataaatcctggttgctgtctcttttagaggagttgtggcccgttgtccgtcaacgtggcgtggtgtgctctgtgtttgctgacgcaacccccactggctggggcattgccaccacctgtcaactcctttctgggactttcgctttccccctcccgatcgccacggcagaactcatcgccgcctgccttgcccgctgctggacaggggctaggttgctgggcactgataattccgtggtgttgtctgtgccttctagttgccagccatctgttgtttgcccctcccccgtgccttccttgaccctggaaggtgccactcccactgtcctttcctaataaaatgaggaaattgcatcgcattgtctgagtaggtgtcattctattctggggggtggggtggggcaggacagcaagggggaggattgggaagacaatagcaggcatgctggggatgcggtgggctctatggctctagagcatggctacgtagataagtagcatggcgggttaatcattaactacacctgcaggaggaacccctagtgatggagttggccactccctctctgcgcgctcgctcgctcactgaggccgggcgaccaaaggtcgcccgacgcccgggcggcctcagtgagcgagcgagcgcgcagctgcctgcagg

SEQ ID NO: 24 - DNA, 6001 bp, Artificial Sequence
  Description of Artificial Sequence: Synthetic polynucleotide
cctgcaggcagctgcgcgctcgctcgctcactgaggccgcccgggcaaagcccgggcgtcgggcgacctttggtcgcccggcctcagtgagcgagcgagcgcgcagagagggagtggccaactccatcactaggggttccttgtagttaatgattaacccgccatgctacttatctacgtagccatgctctagacgggggaggctgctggtgaatattaaccaaggtcaccccagttatcggaggagcaaacaggggctaagtccacacgcgtggtaccgtctgtctgcacatttcgtagagcgagtgttccgatactctaatctccctaggcaaggttcatatttgtgtaggttacttattctccttttgttgactaagtcaataatcagaatcagcaggtttggagtcagcttggcagggatcagcagcctgggttggaaggagggggtataaaagccccttcaccaggagaagccgtcacacagatccacaagctcctgaagaggtaagggtttaagggatggttggttggtggggtattaatgtttaattacctggagcacctgcctgaaatcactttttttcaggttggtttaaacgccgccaccatgatgaggcccattgtgctggtgctgctgtttgccacctctgccctggctgccaccaggagatactacctgggggctgtggagctgtcctgggactacatgcagtcagacctgggggagctgccagttgatgccaggttcccccccagagtccccaagtccttccccttcaacacctcagtggtgtacaaaaagaccctgtttgtggagttcacagaccacctgttcaacatagccaagcccaggcccccctggatgggcctgctgggccccaccatccaggcagaggtttatgacacagtggtcatcaccctgaagaacatggcctcccaccctgtgtccctccatgctgtgggggtgagctactggaaggccagtgagggggcagaatatgatgaccagaccagccagagggagaaggaggatgacaaggtgttcccagggggcagccacacctatgtgtggcaggtcctgaaggagaatggccccatggcctctgaccccctctgcctcacctactcctacctgtcccatgtggacctggtgaaggacctcaactctggcctgattggagccctcctggtgtgcagggaggggagcctggccaaggaaaagacccagaccctgcacaagtttatcctgctctttgcagtctttgatgaggggaagtcctggcacagtgagaccaagaactccctgatgcaggacagagatgctgcctcagccagggcctggcccaagatgcacacagtgaatgggtatgtcaacaggagcctgccaggcctgattgggtgccacagaaagtcagtgtactggcatgtcattggcatgggcaccaccccagaggtgcactccatcttcctggagggccacaccttcctggtgaggaaccacagacaggccagcctggagatcagcccaatcaccttcctcacagcccagaccctcctcatggacctgggccagtttctcctgttctgccacatctcctcccaccagcatgatggcatggaggcctatgtgaaggtggacagctgccctgaggagccccagctcaggatgaagaacaatgaggaggcagaggactatgatgatgatctgacagactctgagatggatgtggtgagatttgatgatgacaacagcccctccttcatccagatcaggtctgtggccaagaagcaccctaagacctgggtgcactacattgcagctgaggaggaggactgggactatgcccccctggtcctggcccctgatgataggtcctacaagtcccagtacctgaacaatggcccccagaggatagggagaaagtacaagaaggtgaggttcatggcctacactgatgagaccttcaagactagggaagccatccagcatgagtctgggatcctgggccccctcctctatggggaggtgggggacaccctgctgatcatcttcaagaaccaggccagcaggccctacaacatttacccccatgggatcacagatgtgagacccctgtacagcaggagactgccaaagggggtgaagcacctgaaggacttccccatcctgccaggggagatcttcaagtacaagtggactgtgacagtggaggatgggcccaccaaatctgaccctagatgcctgaccagatactacagcagctttgtgaacatggagagggacctggcctctggactgattggccctctgctgatctgctacaaggagagtgtggaccagaggggaaaccagatcatgtctgacaagaggaatgtgatcctgttctcagtgtttgatgagaacagatcctggtacctcactgagaacatccagaggttcctgcccaacccagcaggggtgcagctggaggacccagagttccaggcctccaacatcatgcactccatcaatggctatgtctttgactccctgcagctgtcagtgtgcctgcatgaggtggcctactggtacatcctctccattggagcccagactgacttcctgtcagtcttcttcagtggctacaccttcaagcacaagatggtctatgaggacactctgaccctgttccccttctctggggagactgtgttcatgtccatggagaaccctggactgtggatcctgggctgccacaacagtgacttcaggaacaggggcatgactgccctgctgaaggtctccagctgtgacaagaacactggggactactatgaggactcctatgaggacatctctgcctacctgctgtccaagaacaatgccattgagcccaggtccttctcccagaacagcagacacccctccaccaggcagaagcagttcaatgcaaccaccatccctgaaaataccaccctgcagagtgaccaggaggagattgactatgatgacaccatctctgtggagatgaagaaggaggactttgacatctatgatgaggatgagaaccagagccctagaagcttccagaagaagaccagacactacttcattgctgcagtggaaagactgtgggactatgggatgagctcctccccccatgtgctgaggaacagggcccagtctggctctgtgccccagttcaagaaggtggtgttccaggagttcactgatggctccttcacccagcccctgtacaggggagagctgaatgagcacctgggcctgctgggcccctacatcagggctgaggtggaggacaatatcatggtgaccttcagaaaccaggcctccagaccttactccttctacagcagcctgatctcctatgaggaggaccagagacagggggctgagcccaggaagaactttgtgaagcccaatgagaccaagacctacttctggaaggtgcagcaccacatggcccccaccaaggatgagtttgactgcaaggcctgggcctacttctctgatgtggacctggagaaggatgtgcactctggcctgattggccccctgctggtgtgccacaccaacaccctgaaccctgcccatggcaggcaggtgactgtgcaggagtttgccctgttcttcaccatctttgatgagaccaagagctggtacttcactgagaacatggagaggaactgcagggccccctgcaacatccagatggaggaccccaccttcaaggagaactacaggttccatgccatcaatggctacatcatggacaccctgcctggcctggtgatggcccaggaccagaggatcaggtggtacctgctgagcatggggagcaatgagaacatccacagcatccacttctctggccatgtgttcacagtgaggaagaaggaggagtacaagatggccctgtacaacctgtaccctggggtgtttgagacagtggagatgctgccctccaaggctggaatctggagggtggagtgcctgattggggagcacctgcatgctggcatgagcaccctgttcctggtgtacagcaacaagtgccagacccccctgggcatggcctctggccacatcagagacttccagatcacagcctcaggccagtatggccagtgggcccccaagctggccaggctgcactactctggcagcatcaatgcctggtccaccaaggagcccttcagctggatcaaggtggacctcctggcccccatgatcatccatggcatcaagacccagggggccaggcagaagttcagctccctgtacatctcccagttcatcatcatgtactccctggatggcaagaagtggcagacctacagaggcaacagcacaggcaccctgatggtgttctttggcaatgtggacagctctgggatcaagcacaacatcttcaacccccccatcattgccaggtacatcagactgcaccccacccactactccatcaggtccaccctgagaatggagctgatgggctgtgacctgaacagctgcagcatgcccctgggcatggagagcaaggccatctctgatgcccagatcacagccagcagctacttcaccaacatgtttgccacctggtcccccagcaaggccaggctgcacctgcagggcaggagcaatgcctggaggccccaggtgaacaaccccaaggagtggctgcaggtggacttccagaagaccatgaaggtgacaggggtgaccacccagggggtgaagtccctgctgaccagcatgtatgtgaaggagttcctgatcagcagctcccaggatggccaccagtggaccctgttcttccagaatggcaaggtgaaggtgttccagggcaaccaggacagcttcacccctgtggtgaactccctggacccccccctgctgaccagatacctgaggatccacccccagtcctgggtgcaccagattgccctgagaatggaggtgctgggctgtgaggcccaggacctgtactgattaattaagagcatcttaccgccatttattcccatatttgttctgtttttcttgatttgggtatacatttaaatgttaataaaacaaaatggtggggcaatcatttacatttttagggatatgtaattactagttcaggtgtattgccacaagacaaacatgttaagaaactttcccgttatttacgctctgttcctgttaatcaacctctggattacaaaatttgtgaaagattgactgatattcttaactatgttgctccttttacgctgtgtggatatgctgctttatagcctctgtatctagctattgcttcccgtacggctttcgttttctcctccttgtataaatcctggttgctgtctcttttagaggagttgtggcccgttgtccgtcaacgtggcgtggtgtgctctgtgtttgctgacgcaacccccactggctggggcattgccaccacctgtcaactcctttctgggactttcgctttccccctcccgatcgccacggcagaactcatcgccgcctgccttgcccgctgctggacaggggctaggttgctgggcactgataattccgtggtgttgtctgtgccttctagttgccagccatctgttgtttgcccctcccccgtgccttccttgaccctggaaggtgccactcccactgtcctttcctaataaaatgaggaaattgcatcgcattgtctgagtaggtgtcattctattctggggggtggggtggggcaggacagcaagggggaggattgggaagacaatagcaggcatgctggggatgcggtgggctctatggctctagagcatggctacgtagataagtagcatggcgggttaatcattaactacacctgcaggaggaacccctagtgatggagttggccactccctctctgcgcgctcgctcgctcactgaggccgggcgaccaaaggtcgcccgacgcccgggcggcctcagtgagcgagcgagcgcgcagctgcctgcagg

SEQ ID NO: 25 - DNA, 5998 bp, Artificial Sequence
  Description of Artificial Sequence: Synthetic polynucleotide
cctgcaggcagctgcgcgctcgctcgctcactgaggccgcccgggcaaagcccgggcgtcgggcgacctttggtcgcccggcctcagtgagcgagcgagcgcgcagagagggagtggccaactccatcactaggggttccttgtagttaatgattaacccgccatgctacttatctacgtagccatgctctagacgggggaggctgctggtgaatattaaccaaggtcaccccagttatcggaggagcaaacaggggctaagtccacacgcgtggtaccgtctgtctgcacatttcgtagagcgagtgttccgatactctaatctccctaggcaaggttcatatttgtgtaggttacttattctccttttgttgactaagtcaataatcagaatcagcaggtttggagtcagcttggcagggatcagcagcctgggttggaaggagggggtataaaagccccttcaccaggagaagccgtcacacagatccacaagctcctgaagaggtaagggtttaagggatggttggttggtggggtattaatgtttaattacctggagcacctgcctgaaatcactttttttcaggttggtttaaacgccgccaccatgaagtgggtcacctttatatccttactcttctcctcagcatactctgccaccaggagatactacctgggggctgtggagctgagctgggactacatgcagtctgacctgggggagctgcctgtggatgccaggttcccccccagagtgcccaagagcttccccttcaacacctctgtggtgtacaagaagaccctgtttgtggagttcactgaccacctgttcaacattgccaagcccaggcccccctggatgggcctgctgggccccaccatccaggctgaggtgtatgacactgtggtgatcaccctgaagaacatggccagccaccctgtgagcctgcatgctgtgggggtgagctactggaaggcctctgagggggctgagtatgatgaccagaccagccagagggagaaggaggatgacaaggtgttccctgggggcagccacacctatgtgtggcaggtgctgaaggagaatggccccatggcctctgaccccctgtgcctgacctacagctacctgagccatgtggacctggtgaaggacctgaactctggcctgattggggccctgctggtgtgcagggagggcagcctggccaaggagaagacccagaccctgcacaagttcatcctgctgtttgctgtgtttgatgagggcaagagctggcactctgaaaccaagaacagcctgatgcaggacagggatgctgcctctgccagggcctggcccaagatgcacactgtgaatggctatgtgaacaggagcctgcctggcctgattggctgccacaggaagtctgtgtactggcatgtgattggcatgggcaccacccctgaggtgcacagcatcttcctggagggccacaccttcctggtcaggaaccacaggcaggccagcctggagatcagccccatcaccttcctgactgcccagaccctgctgatggacctgggccagttcctgctgttctgccacatcagcagccaccagcatgatggcatggaggcctatgtgaaggtggacagctgccctgaggagccccagctgaggatgaagaacaatgaggaggctgaggactatgatgatgacctgactgactctgagatggatgtggtgaggtttgatgatgacaacagccccagcttcatccagatcaggtctgtggccaagaagcaccccaagacctgggtgcactacattgctgctgaggaggaggactgggactatgcccccctggtgctggcccctgatgacaggagctacaagagccagtacctgaacaatggcccccagaggattggcaggaagtacaagaaggtcaggttcatggcctacactgatgaaaccttcaagaccagggaggccatccagcatgagtctggcatcctgggccccctgctgtatggggaggtgggggacaccctgctgatcatcttcaagaaccaggccagcaggccctacaacatctacccccatggcatcactgatgtgaggcccctgtacagcaggaggctgcccaagggggtgaagcacctgaaggacttccccatcctgcctggggagatcttcaagtacaagtggactgtgactgtggaggatggccccaccaagtctgaccccaggtgcctgaccagatactacagcagctttgtgaacatggagagggacctggcctctggcctgattggccccctgctgatctgctacaaggagtctgtggaccagaggggcaaccagatcatgtctgacaagaggaatgtgatcctgttctctgtgtttgatgagaacaggagctggtacctgactgagaacatccagaggttcctgcccaaccctgctggggtgcagctggaggaccctgagttccaggccagcaacatcatgcacagcatcaatggctatgtgtttgacagcctgcagctgtctgtgtgcctgcatgaggtggcctactggtacatcctgagcattggggcccagactgacttcctgtctgtgttcttctctggctacaccttcaagcacaagatggtgtatgaggacaccctgaccctgttccccttctctggggagactgtgttcatgagcatggagaaccctggcctgtggattctgggctgccacaactctgacttcaggaacaggggcatgactgccctgctgaaagtctccagctgtgacaagaacactggggactactatgaggacagctatgaggacatctctgcctacctgctgagcaagaacaatgccattgagcccaggagcttcagccagaatagcaggcaccccagcaccaggcagaagcagttcaatgccaccaccatcccagagaataccaccctgcagtctgaccaggaggagattgactatgatgacaccatctctgtggagatgaagaaggaggactttgacatctacgacgaggacgagaaccagagccccaggagcttccagaagaagaccaggcactacttcattgctgctgtggagaggctgtgggactatggcatgagcagcagcccccatgtgctgaggaacagggcccagtctggctctgtgccccagttcaagaaggtggtgttccaggagttcactgatggcagcttcacccagcccctgtacagaggggagctgaatgagcacctgggcctgctgggcccctacatcagggctgaggtggaggacaacatcatggtgaccttcaggaaccaggccagcaggccctacagcttctacagcagcctgatcagctatgaggaggaccagaggcagggggctgagcccaggaagaactttgtgaagcccaatgaaaccaagacctacttctggaaggtgcagcaccacatggcccccaccaaggatgagtttgactgcaaggcctgggcctacttctctgatgtggacctggagaaggatgtgcactctggcctgattggccccctgctggtgtgccacaccaacaccctgaaccctgcccatggcaggcaggtgactgtgcaggagtttgccctgttcttcaccatctttgatgaaaccaagagctggtacttcactgagaacatggagaggaactgcagggccccctgcaacatccagatggaggaccccaccttcaaggagaactacaggttccatgccatcaatggctacatcatggacaccctgcctggcctggtgatggcccaggaccagaggatcaggtggtacctgctgagcatgggcagcaatgagaacatccacagcatccacttctctggccatgtgttcactgtgaggaagaaggaggagtacaagatggccctgtacaacctgtaccctggggtgtttgagactgtggagatgctgcccagcaaggctggcatctggagggtggagtgcctgattggggagcacctgcatgctggcatgagcaccctgttcctggtgtacagcaacaagtgccagacccccctgggcatggcctctggccacatcagggacttccagatcactgcctctggccagtatggccagtgggcccccaagctggccaggctgcactactctggcagcatcaatgcctggagcaccaaggagcccttcagctggatcaaggtggacctgctggcccccatgatcatccatggcatcaagacccagggggccaggcagaagttcagcagcctgtacatcagccagttcatcatcatgtacagcctggatggcaagaagtggcagacctacaggggcaacagcactggcaccctgatggtgttctttggcaatgtggacagctctggcatcaagcacaacatcttcaacccccccatcattgccagatacatcaggctgcaccccacccactacagcatcaggagcaccctgaggatggagctgatgggctgtgacctgaacagctgcagcatgcccctgggcatggagagcaaggccatctctgatgcccagatcactgccagcagctacttcaccaacatgtttgccacctggagccccagcaaggccaggctgcacctgcagggcaggagcaatgcctggaggccccaggtcaacaaccccaaggagtggctgcaggtggacttccagaagaccatgaaggtgactggggtgaccacccagggggtgaagagcctgctgaccagcatgtatgtgaaggagttcctgatcagcagcagccaggatggccaccagtggaccctgttcttccagaatggcaaggtgaaggtgttccagggcaaccaggacagcttcacccctgtggtgaacagcctggacccccccctgctgaccagatacctgaggattcacccccagagctgggtgcaccagattgccctgaggatggaggtgctgggctgtgaggcccaggacctgtactgattaattaagagcatcttaccgccatttattcccatatttgttctgtttttcttgatttgggtatacatttaaatgttaataaaacaaaatggtggggcaatcatttacatttttagggatatgtaattactagttcaggtgtattgccacaagacaaacatgttaagaaactttcccgttatttacgctctgttcctgttaatcaacctctggattacaaaatttgtgaaagattgactgatattcttaactatgttgctccttttacgctgtgtggatatgctgctttatagcctctgtatctagctattgcttcccgtacggctttcgttttctcctccttgtataaatcctggttgctgtctcttttagaggagttgtggcccgttgtccgtcaacgtggcgtggtgtgctctgtgtttgctgacgcaacccccactggctggggcattgccaccacctgtcaactcctttctgggactttcgctttccccctcccgatcgccacggcagaactcatcgccgcctgccttgcccgctgctggacaggggctaggttgctgggcactgataattccgtggtgttgtctgtgccttctagttgccagccatctgttgtttgcccctcccccgtgccttccttgaccctggaaggtgccactcccactgtcctttcctaataaaatgaggaaattgcatcgcattgtctgagtaggtgtcattctattctggggggtggggtggggcaggacagcaagggggaggattgggaagacaatagcaggcatgctggggatgcggtgggctctatggctctagagcatggctacgtagataagtagcatggcgggttaatcattaactacacctgcaggaggaacccctagtgatggagttggccactccctctctgcgcgctcgctcgctcactgaggccgggcgaccaaaggtcgcccgacgcccgggcggcctcagtgagcgagcgagcgcgcagctgcctgcagg

SEQ ID NO: 26 - DNA, 6004 bp, Artificial Sequence
  Description of Artificial Sequence: Synthetic polynucleotide
cctgcaggcagctgcgcgctcgctcgctcactgaggccgcccgggcaaagcccgggcgtcgggcgacctttggtcgcccggcctcagtgagcgagcgagcgcgcagagagggagtggccaactccatcactaggggttccttgtagttaatgattaacccgccatgctacttatctacgtagccatgctctagacgggggaggctgctggtgaatattaaccaaggtcaccccagttatcggaggagcaaacaggggctaagtccacacgcgtggtaccgtctgtctgcacatttcgtagagcgagtgttccgatactctaatctccctaggcaaggttcatatttgtgtaggttacttattctccttttgttgactaagtcaataatcagaatcagcaggtttggagtcagcttggcagggatcagcagcctgggttggaaggagggggtataaaagccccttcaccaggagaagccgtcacacagatccacaagctcctgaagaggtaagggtttaagggatggttggttggtggggtattaatgtttaattacctggagcacctgcctgaaatcactttttttcaggttggtttaaacgccgccaccatggcatttctgtggctgctgtcctgctgggctctgctgggcactacctttggggccaccaggagatactacctgggggctgtggagctgagctgggactacatgcagtctgacctgggggagctgcctgtggatgccaggttcccccccagagtgcccaagagcttccccttcaacacctctgtggtgtacaagaagaccctgtttgtggagttcactgaccacctgttcaacattgccaagcccaggcccccctggatgggcctgctgggccccaccatccaggctgaggtgtatgacactgtggtgatcaccctgaagaacatggccagccaccctgtgagcctgcatgctgtgggggtgagctactggaaggcctctgagggggctgagtatgatgaccagaccagccagagggagaaggaggatgacaaggtgttccctgggggcagccacacctatgtgtggcaggtgctgaaggagaatggccccatggcctctgaccccctgtgcctgacctacagctacctgagccatgtggacctggtgaaggacctgaactctggcctgattggggccctgctggtgtgcagggagggcagcctggccaaggagaagacccagaccctgcacaagttcatcctgctgtttgctgtgtttgatgagggcaagagctggcactctgaaaccaagaacagcctgatgcaggacagggatgctgcctctgccagggcctggcccaagatgcacactgtgaatggctatgtgaacaggagcctgcctggcctgattggctgccacaggaagtctgtgtactggcatgtgattggcatgggcaccacccctgaggtgcacagcatcttcctggagggccacaccttcctggtcaggaaccacaggcaggccagcctggagatcagccccatcaccttcctgactgcccagaccctgctgatggacctgggccagttcctgctgttctgccacatcagcagccaccagcatgatggcatggaggcctatgtgaaggtggacagctgccctgaggagccccagctgaggatgaagaacaatgaggaggctgaggactatgatgatgacctgactgactctgagatggatgtggtgaggtttgatgatgacaacagccccagcttcatccagatcaggtctgtggccaagaagcaccccaagacctgggtgcactacattgctgctgaggaggaggactgggactatgcccccctggtgctggcccctgatgacaggagctacaagagccagtacctgaacaatggcccccagaggattggcaggaagtacaagaaggtcaggttcatggcctacactgatgaaaccttcaagaccagggaggccatccagcatgagtctggcatcctgggccccctgctgtatggggaggtgggggacaccctgctgatcatcttcaagaaccaggccagcaggccctacaacatctacccccatggcatcactgatgtgaggcccctgtacagcaggaggctgcccaagggggtgaagcacctgaaggacttccccatcctgcctggggagatcttcaagtacaagtggactgtgactgtggaggatggccccaccaagtctgaccccaggtgcctgaccagatactacagcagctttgtgaacatggagagggacctggcctctggcctgattggccccctgctgatctgctacaaggagtctgtggaccagaggggcaaccagatcatgtctgacaagaggaatgtgatcctgttctctgtgtttgatgagaacaggagctggtacctgactgagaacatccagaggttcctgcccaaccctgctggggtgcagctggaggaccctgagttccaggccagcaacatcatgcacagcatcaatggctatgtgtttgacagcctgcagctgtctgtgtgcctgcatgaggtggcctactggtacatcctgagcattggggcccagactgacttcctgtctgtgttcttctctggctacaccttcaagcacaagatggtgtatgaggacaccctgaccctgttccccttctctggggagactgtgttcatgagcatggagaaccctggcctgtggattctgggctgccacaactctgacttcaggaacaggggcatgactgccctgctgaaagtctccagctgtgacaagaacactggggactactatgaggacagctatgaggacatctctgcctacctgctgagcaagaacaatgccattgagcccaggagcttcagccagaatagcaggcaccccagcaccaggcagaagcagttcaatgccaccaccatcccagagaataccaccctgcagtctgaccaggaggagattgactatgatgacaccatctctgtggagatgaagaaggaggactttgacatctacgacgaggacgagaaccagagccccaggagcttccagaagaagaccaggcactacttcattgctgctgtggagaggctgtgggactatggcatgagcagcagcccccatgtgctgaggaacagggcccagtctggctctgtgccccagttcaagaaggtggtgttccaggagttcactgatggcagcttcacccagcccctgtacagaggggagctgaatgagcacctgggcctgctgggcccctacatcagggctgaggtggaggacaacatcatggtgaccttcaggaaccaggccagcaggccctacagcttctacagcagcctgatcagctatgaggaggaccagaggcagggggctgagcccaggaagaactttgtgaagcccaatgaaaccaagacctacttctggaaggtgcagcaccacatggcccccaccaaggatgagtttgactgcaaggcctgggcctacttctctgatgtggacctggagaaggatgtgcactctggcctgattggccccctgctggtgtgccacaccaacaccctgaaccctgcccatggcaggcaggtgactgtgcaggagtttgccctgttcttcaccatctttgatgaaaccaagagctggtacttcactgagaacatggagaggaactgcagggccccctgcaacatccagatggaggaccccaccttcaaggagaactacaggttccatgccatcaatggctacatcatggacaccctgcctggcctggtgatggcccaggaccagaggatcaggtggtacctgctgagcatgggcagcaatgagaacatccacagcatccacttctctggccatgtgttcactgtgaggaagaaggaggagtacaagatggccctgtacaacctgtaccctggggtgtttgagactgtggagatgctgcccagcaaggctggcatctggagggtggagtgcctgattggggagcacctgcatgctggcatgagcaccctgttcctggtgtacagcaacaagtgccagacccccctgggcatggcctctggccacatcagggacttccagatcactgcctctggccagtatggccagtgggcccccaagctggccaggctgcactactctggcagcatcaatgcctggagcaccaaggagcccttcagctggatcaaggtggacctgctggcccccatgatcatccatggcatcaagacccagggggccaggcagaagttcagcagcctgtacatcagccagttcatcatcatgtacagcctggatggcaagaagtggcagacctacaggggcaacagcactggcaccctgatggtgttctttggcaatgtggacagctctggcatcaagcacaacatcttcaacccccccatcattgccagatacatcaggctgcaccccacccactacagcatcaggagcaccctgaggatggagctgatgggctgtgacctgaacagctgcagcatgcccctgggcatggagagcaaggccatctctgatgcccagatcactgccagcagctacttcaccaacatgtttgccacctggagccccagcaaggccaggctgcacctgcagggcaggagcaatgcctggaggccccaggtcaacaaccccaaggagtggctgcaggtggacttccagaagaccatgaaggtgactggggtgaccacccagggggtgaagagcctgctgaccagcatgtatgtgaaggagttcctgatcagcagcagccaggatggccaccagtggaccctgttcttccagaatggcaaggtgaaggtgttccagggcaaccaggacagcttcacccctgtggtgaacagcctggacccccccctgctgaccagatacctgaggattcacccccagagctgggtgcaccagattgccctgaggatggaggtgctgggctgtgaggcccaggacctgtactgattaattaagagcatcttaccgccatttattcccatatttgttctgtttttcttgatttgggtatacatttaaatgttaataaaacaaaatggtggggcaatcatttacatttttagggatatgtaattactagttcaggtgtattgccacaagacaaacatgttaagaaactttcccgttatttacgctctgttcctgttaatcaacctctggattacaaaatttgtgaaagattgactgatattcttaactatgttgctccttttacgctgtgtggatatgctgctttatagcctctgtatctagctattgcttcccgtacggctttcgttttctcctccttgtataaatcctggttgctgtctcttttagaggagttgtggcccgttgtccgtcaacgtggcgtggtgtgctctgtgtttgctgacgcaacccccactggctggggcattgccaccacctgtcaactcctttctgggactttcgctttccccctcccgatcgccacggcagaactcatcgccgcctgccttgcccgctgctggacaggggctaggttgctgggcactgataattccgtggtgttgtctgtgccttctagttgccagccatctgttgtttgcccctcccccgtgccttccttgaccctggaaggtgccactcccactgtcctttcctaataaaatgaggaaattgcatcgcattgtctgagtaggtgtcattctattctggggggtggggtggggcaggacagcaagggggaggattgggaagacaatagcaggcatgctggggatgcggtgggctctatggctctagagcatggctacgtagataagtagcatggcgggttaatcattaactacacctgcaggaggaacccctagtgatggagttggccactccctctctgcgcgctcgctcgctcactgaggccgggcgaccaaaggtcgcccgacgcccgggcggcctcagtgagcgagcgagcgcgcagctgcctgcagg

SEQ ID NO: 27 - DNA, 6001 bp, Artificial Sequence
  Description of Artificial Sequence: Synthetic polynucleotide
cctgcaggcagctgcgcgctcgctcgctcactgaggccgcccgggcaaagcccgggcgtcgggcgacctttggtcgcccggcctcagtgagcgagcgagcgcgcagagagggagtggccaactccatcactaggggttccttgtagttaatgattaacccgccatgctacttatctacgtagccatgctctagacgggggaggctgctggtgaatattaaccaaggtcaccccagttatcggaggagcaaacaggggctaagtccacacgcgtggtaccgtctgtctgcacatttcgtagagcgagtgttccgatactctaatctccctaggcaaggttcatatttgtgtaggttacttattctccttttgttgactaagtcaataatcagaatcagcaggtttggagtcagcttggcagggatcagcagcctgggttggaaggagggggtataaaagccccttcaccaggagaagccgtcacacagatccacaagctcctgaagaggtaagggtttaagggatggttggttggtggggtattaatgtttaattacctggagcacctgcctgaaatcactttttttcaggttggtttaaacgccgccaccatgatgaggcccattgtcctggtgcttctatttgcaacaagtgccctggctgccaccaggagatactacctgggggctgtggagctgagctgggactacatgcagtctgacctgggggagctgcctgtggatgccaggttcccccccagagtgcccaagagcttccccttcaacacctctgtggtgtacaagaagaccctgtttgtggagttcactgaccacctgttcaacattgccaagcccaggcccccctggatgggcctgctgggccccaccatccaggctgaggtgtatgacactgtggtgatcaccctgaagaacatggccagccaccctgtgagcctgcatgctgtgggggtgagctactggaaggcctctgagggggctgagtatgatgaccagaccagccagagggagaaggaggatgacaaggtgttccctgggggcagccacacctatgtgtggcaggtgctgaaggagaatggccccatggcctctgaccccctgtgcctgacctacagctacctgagccatgtggacctggtgaaggacctgaactctggcctgattggggccctgctggtgtgcagggagggcagcctggccaaggagaagacccagaccctgcacaagttcatcctgctgtttgctgtgtttgatgagggcaagagctggcactctgaaaccaagaacagcctgatgcaggacagggatgctgcctctgccagggcctggcccaagatgcacactgtgaatggctatgtgaacaggagcctgcctggcctgattggctgccacaggaagtctgtgtactggcatgtgattggcatgggcaccacccctgaggtgcacagcatcttcctggagggccacaccttcctggtcaggaaccacaggcaggccagcctggagatcagccccatcaccttcctgactgcccagaccctgctgatggacctgggccagttcctgctgttctgccacatcagcagccaccagcatgatggcatggaggcctatgtgaaggtggacagctgccctgaggagccccagctgaggatgaagaacaatgaggaggctgaggactatgatgatgacctgactgactctgagatggatgtggtgaggtttgatgatgacaacagccccagcttcatccagatcaggtctgtggccaagaagcaccccaagacctgggtgcactacattgctgctgaggaggaggactgggactatgcccccctggtgctggcccctgatgacaggagctacaagagccagtacctgaacaatggcccccagaggattggcaggaagtacaagaaggtcaggttcatggcctacactgatgaaaccttcaagaccagggaggccatccagcatgagtctggcatcctgggccccctgctgtatggggaggtgggggacaccctgctgatcatcttcaagaaccaggccagcaggccctacaacatctacccccatggcatcactgatgtgaggcccctgtacagcaggaggctgcccaagggggtgaagcacctgaaggacttccccatcctgcctggggagatcttcaagtacaagtggactgtgactgtggaggatggccccaccaagtctgaccccaggtgcctgaccagatactacagcagctttgtgaacatggagagggacctggcctctggcctgattggccccctgctgatctgctacaaggagtctgtggaccagaggggcaaccagatcatgtctgacaagaggaatgtgatcctgttctctgtgtttgatgagaacaggagctggtacctgactgagaacatccagaggttcctgcccaaccctgctggggtgcagctggaggaccctgagttccaggccagcaacatcatgcacagcatcaatggctatgtgtttgacagcctgcagctgtctgtgtgcctgcatgaggtggcctactggtacatcctgagcattggggcccagactgacttcctgtctgtgttcttctctggctacaccttcaagcacaagatggtgtatgaggacaccctgaccctgttccccttctctggggagactgtgttcatgagcatggagaaccctggcctgtggattctgggctgccacaactctgacttcaggaacaggggcatgactgccctgctgaaagtctccagctgtgacaagaacactggggactactatgaggacagctatgaggacatctctgcctacctgctgagcaagaacaatgccattgagcccaggagcttcagccagaatagcaggcaccccagcaccaggcagaagcagttcaatgccaccaccatcccagagaataccaccctgcagtctgaccaggaggagattgactatgatgacaccatctctgtggagatgaagaaggaggactttgacatctacgacgaggacgagaaccagagccccaggagcttccagaagaagaccaggcactacttcattgctgctgtggagaggctgtgggactatggcatgagcagcagcccccatgtgctgaggaacagggcccagtctggctctgtgccccagttcaagaaggtggtgttccaggagttcactgatggcagcttcacccagcccctgtacagaggggagctgaatgagcacctgggcctgctgggcccctacatcagggctgaggtggaggacaacatcatggtgaccttcaggaaccaggccagcaggccctacagcttctacagcagcctgatcagctatgaggaggaccagaggcagggggctgagcccaggaagaactttgtgaagcccaatgaaaccaagacctacttctggaaggtgcagcaccacatggcccccaccaaggatgagtttgactgcaaggcctgggcctacttctctgatgtggacctggagaaggatgtgcactctggcctgattggccccctgctggtgtgccacaccaacaccctgaaccctgcccatggcaggcaggtgactgtgcaggagtttgccctgttcttcaccatctttgatgaaaccaagagctggtacttcactgagaacatggagaggaactgcagggccccctgcaacatccagatggaggaccccaccttcaaggagaactacaggttccatgccatcaatggctacatcatggacaccctgcctggcctggtgatggcccaggaccagaggatcaggtggtacctgctgagcatgggcagcaatgagaacatccacagcatccacttctctggccatgtgttcactgtgaggaagaaggaggagtacaagatggccctgtacaacctgtaccctggggtgtttgagactgtggagatgctgcccagcaaggctggcatctggagggtggagtgcctgattggggagcacctgcatgctggcatgagcaccctgttcctggtgtacagcaacaagtgccagacccccctgggcatggcctctggccacatcagggacttccagatcactgcctctggccagtatggccagtgggcccccaagctggccaggctgcactactctggcagcatcaatgcctggagcaccaaggagcccttcagctggatcaaggtggacctgctggcccccatgatcatccatggcatcaagacccagggggccaggcagaagttcagcagcctgtacatcagccagttcatcatcatgtacagcctggatggcaagaagtggcagacctacaggggcaacagcactggcaccctgatggtgttctttggcaatgtggacagctctggcatcaagcacaacatcttcaacccccccatcattgccagatacatcaggctgcaccccacccactacagcatcaggagcaccctgaggatggagctgatgggctgtgacctgaacagctgcagcatgcccctgggcatggagagcaaggccatctctgatgcccagatcactgccagcagctacttcaccaacatgtttgccacctggagccccagcaaggccaggctgcacctgcagggcaggagcaatgcctggaggccccaggtcaacaaccccaaggagtggctgcaggtggacttccagaagaccatgaaggtgactggggtgaccacccagggggtgaagagcctgctgaccagcatgtatgtgaaggagttcctgatcagcagcagccaggatggccaccagtggaccctgttcttccagaatggcaaggtgaaggtgttccagggcaaccaggacagcttcacccctgtggtgaacagcctggacccccccctgctgaccagatacctgaggattcacccccagagctgggtgcaccagattgccctgaggatggaggtgctgggctgtgaggcccaggacctgtactgattaattaagagcatcttaccgccatttattcccatatttgttctgtttttcttgatttgggtatacatttaaatgttaataaaacaaaatggtggggcaatcatttacatttttagggatatgtaattactagttcaggtgtattgccacaagacaaacatgttaagaaactttcccgttatttacgctctgttcctgttaatcaacctctggattacaaaatttgtgaaagattgactgatattcttaactatgttgctccttttacgctgtgtggatatgctgctttatagcctctgtatctagctattgcttcccgtacggctttcgttttctcctccttgtataaatcctggttgctgtctcttttagaggagttgtggcccgttgtccgtcaacgtggcgtggtgtgctctgtgtttgctgacgcaacccccactggctggggcattgccaccacctgtcaactcctttctgggactttcgctttccccctcccgatcgccacggcagaactcatcgccgcctgccttgcccgctgctggacaggggctaggttgctgggcactgataattccgtggtgttgtctgtgccttctagttgccagccatctgttgtttgcccctcccccgtgccttccttgaccctggaaggtgccactcccactgtcctttcctaataaaatgaggaaattgcatcgcattgtctgagtaggtgtcattctattctggggggtggggtggggcaggacagcaagggggaggattgggaagacaatagcaggcatgctggggatgcggtgggctctatggctctagagcatggctacgtagataagtagcatggcgggttaatcattaactacacctgcaggaggaacccctagtgatggagttggccactccctctctgcgcgctcgctcgctcactgaggccgggcgaccaaaggtcgcccgacgcccgggcggcctcagtgagcgagcgagcgcgcagctgcctgcagg

SEQ ID NO: 28 - DNA, 6013 bp, Artificial Sequence
  Description of Artificial Sequence: Synthetic polynucleotide
cctgcaggcagctgcgcgctcgctcgctcactgaggccgcccgggcaaagcccgggcgtcgggcgacctttggtcgcccggcctcagtgagcgagcgagcgcgcagagagggagtggccaactccatcactaggggttccttgtagttaatgattaacccgccatgctacttatctacgtagccatgctctagacgggggaggctgctggtgaatattaaccaaggtcaccccagttatcggaggagcaaacaggggctaagtccacacgcgtggtaccgtctgtctgcacatttcgtagagcgagtgttccgatactctaatctccctaggcaaggttcatatttgtgtaggttacttattctccttttgttgactaagtcaataatcagaatcagcaggtttggagtcagcttggcagggatcagcagcctgggttggaaggagggggtataaaagccccttcaccaggagaagccgtcacacagatccacaagctcctgaagaggtaagggtttaagggatggttggttggtggggtattaatgtttaattacctggagcacctgcctgaaatcactttttttcaggttggtttaaacgccgccaccatgtggtggaggctgtggtggttactactgcttctgctcctgttatggccaatggtctgggctgccaccaggagatactacctgggggctgtggagctgagctgggactacatgcagtctgacctgggggagctgcctgtggatgccaggttcccccccagagtgcccaagagcttccccttcaacacctctgtggtgtacaagaagaccctgtttgtggagttcactgaccacctgttcaacattgccaagcccaggcccccctggatgggcctgctgggccccaccatccaggctgaggtgtatgacactgtggtgatcaccctgaagaacatggccagccaccctgtgagcctgcatgctgtgggggtgagctactggaaggcctctgagggggctgagtatgatgaccagaccagccagagggagaaggaggatgacaaggtgttccctgggggcagccacacctatgtgtggcaggtgctgaaggagaatggccccatggcctctgaccccctgtgcctgacctacagctacctgagccatgtggacctggtgaaggacctgaactctggcctgattggggccctgctggtgtgcagggagggcagcctggccaaggagaagacccagaccctgcacaagttcatcctgctgtttgctgtgtttgatgagggcaagagctggcactctgaaaccaagaacagcctgatgcaggacagggatgctgcctctgccagggcctggcccaagatgcacactgtgaatggctatgtgaacaggagcctgcctggcctgattggctgccacaggaagtctgtgtactggcatgtgattggcatgggcaccacccctgaggtgcacagcatcttcctggagggccacaccttcctggtcaggaaccacaggcaggccagcctggagatcagccccatcaccttcctgactgcccagaccctgctgatggacctgggccagttcctgctgttctgccacatcagcagccaccagcatgatggcatggaggcctatgtgaaggtggacagctgccctgaggagccccagctgaggatgaagaacaatgaggaggctgaggactatgatgatgacctgactgactctgagatggatgtggtgaggtttgatgatgacaacagccccagcttcatccagatcaggtctgtggccaagaagcaccccaagacctgggtgcactacattgctgctgaggaggaggactgggactatgcccccctggtgctggcccctgatgacaggagctacaagagccagtacctgaacaatggcccccagaggattggcaggaagtacaagaaggtcaggttcatggcctacactgatgaaaccttcaagaccagggaggccatccagcatgagtctggcatcctgggccccctgctgtatggggaggtgggggacaccctgctgatcatcttcaagaaccaggccagcaggccctacaacatctacccccatggcatcactgatgtgaggcccctgtacagcaggaggctgcccaagggggtgaagcacctgaaggacttccccatcctgcctggggagatcttcaagtacaagtggactgtgactgtggaggatggccccaccaagtctgaccccaggtgcctgaccagatactacagcagctttgtgaacatggagagggacctggcctctggcctgattggccccctgctgatctgctacaaggagtctgtggaccagaggggcaaccagatcatgtctgacaagaggaatgtgatcctgttctctgtgtttgatgagaacaggagctggtacctgactgagaacatccagaggttcctgcccaaccctgctggggtgcagctggaggaccctgagttccaggccagcaacatcatgcacagcatcaatggctatgtgtttgacagcctgcagctgtctgtgtgcctgcatgaggtggcctactggtacatcctgagcattggggcccagactgacttcctgtctgtgttcttctctggctacaccttcaagcacaagatggtgtatgaggacaccctgaccctgttccccttctctggggagactgtgttcatgagcatggagaaccctggcctgtggattctgggctgccacaactctgacttcaggaacaggggcatgactgccctgctgaaagtctccagctgtgacaagaacactggggactactatgaggacagctatgaggacatctctgcctacctgctgagcaagaacaatgccattgagcccaggagcttcagccagaatagcaggcaccccagcaccaggcagaagcagttcaatgccaccaccatcccagagaataccaccctgcagtctgaccaggaggagattgactatgatgacaccatctctgtggagatgaagaaggaggactttgacatctacgacgaggacgagaaccagagccccaggagcttccagaagaagaccaggcactacttcattgctgctgtggagaggctgtgggactatggcatgagcagcagcccccatgtgctgaggaacagggcccagtctggctctgtgccccagttcaagaaggtggtgttccaggagttcactgatggcagcttcacccagcccctgtacagaggggagctgaatgagcacctgggcctgctgggcccctacatcagggctgaggtggaggacaacatcatggtgaccttcaggaaccaggccagcaggccctacagcttctacagcagcctgatcagctatgaggaggaccagaggcagggggctgagcccaggaagaactttgtgaagcccaatgaaaccaagacctacttctggaaggtgcagcaccacatggcccccaccaaggatgagtttgactgcaaggcctgggcctacttctctgatgtggacctggagaaggatgtgcactctggcctgattggccccctgctggtgtgccacaccaacaccctgaaccctgcccatggcaggcaggtgactgtgcaggagtttgccctgttcttcaccatctttgatgaaaccaagagctggtacttcactgagaacatggagaggaactgcagggccccctgcaacatccagatggaggaccccaccttcaaggagaactacaggttccatgccatcaatggctacatcatggacaccctgcctggcctggtgatggcccaggaccagaggatcaggtggtacctgctgagcatgggcagcaatgagaacatccacagcatccacttctctggccatgtgttcactgtgaggaagaaggaggagtacaagatggccctgtacaacctgtaccctggggtgtttgagactgtggagatgctgcccagcaaggctggcatctggagggtggagtgcctgattggggagcacctgcatgctggcatgagcaccctgttcctggtgtacagcaacaagtgccagacccccctgggcatggcctctggccacatcagggacttccagatcactgcctctggccagtatggccagtgggcccccaagctggccaggctgcactactctggcagcatcaatgcctggagcaccaaggagcccttcagctggatcaaggtggacctgctggcccccatgatcatccatggcatcaagacccagggggccaggcagaagttcagcagcctgtacatcagccagttcatcatcatgtacagcctggatggcaagaagtggcagacctacaggggcaacagcactggcaccctgatggtgttctttggcaatgtggacagctctggcatcaagcacaacatcttcaacccccccatcattgccagatacatcaggctgcaccccacccactacagcatcaggagcaccctgaggatggagctgatgggctgtgacctgaacagctgcagcatgcccctgggcatggagagcaaggccatctctgatgcccagatcactgccagcagctacttcaccaacatgtttgccacctggagccccagcaaggccaggctgcacctgcagggcaggagcaatgcctggaggccccaggtcaacaaccccaaggagtggctgcaggtggacttccagaagaccatgaaggtgactggggtgaccacccagggggtgaagagcctgctgaccagcatgtatgtgaaggagttcctgatcagcagcagccaggatggccaccagtggaccctgttcttccagaatggcaaggtgaaggtgttccagggcaaccaggacagcttcacccctgtggtgaacagcctggacccccccctgctgaccagatacctgaggattcacccccagagctgggtgcaccagattgccctgaggatggaggtgctgggctgtgaggcccaggacctgtactgattaattaagagcatcttaccgccatttattcccatatttgttctgtttttcttgatttgggtatacatttaaatgttaataaaacaaaatggtggggcaatcatttacatttttagggatatgtaattactagttcaggtgtattgccacaagacaaacatgttaagaaactttcccgttatttacgctctgttcctgttaatcaacctctggattacaaaatttgtgaaagattgactgatattcttaactatgttgctccttttacgctgtgtggatatgctgctttatagcctctgtatctagctattgcttcccgtacggctttcgttttctcctccttgtataaatcctggttgctgtctcttttagaggagttgtggcccgttgtccgtcaacgtggcgtggtgtgctctgtgtttgctgacgcaacccccactggctggggcattgccaccacctgtcaactcctttctgggactttcgctttccccctcccgatcgccacggcagaactcatcgccgcctgccttgcccgctgctggacaggggctaggttgctgggcactgataattccgtggtgttgtctgtgccttctagttgccagccatctgttgtttgcccctcccccgtgccttccttgaccctggaaggtgccactcccactgtcctttcctaataaaatgaggaaattgcatcgcattgtctgagtaggtgtcattctattctggggggtggggtggggcaggacagcaagggggaggattgggaagacaatagcaggcatgctggggatgcggtgggctctatggctctagagcatggctacgtagataagtagcatggcgggttaatcattaactacacctgcaggaggaacccctagtgatggagttggccactccctctctgcgcgctcgctcgctcactgaggccgggcgaccaaaggtcgcccgacgcccgggcggcctcagtgagcgagcgagcgcgcagctgcctgcagg

SEQ ID NO: 29 - DNA, 6869 bp, Artificial Sequence
  Description of Artificial Sequence: Synthetic polynucleotide
cctgcaggcagctgcgcgctcgctcgctcactgaggccgcccgggcaaagcccgggcgtcgggcgacctttggtcgcccggcctcagtgagcgagcgagcgcgcagagagggagtggccaactccatcactaggggttccttgtagttaatgattaacccgccatgctacttatcgcggccgcaggctcagaggcacacaggagtttctgggctcaccctgcccccttccaacccctcagttcccatcctccagcagctgtttgtgtgctgcctctgaagtccacactgaacaaacttcagcctactcatgtccctaaaatgggcaaacattgcaagcagcaaacagcaaacacacagccctccctgcctgctgaccttggagctggggcagaggtcagagacctctctgggcccatgccacctccaacatccactcgaccccttggaatttcggtggagaggagcagaggttgtcctggcgtggtttaggtagtgtgagagggtccgggttcaaaaccacttgctgggtggggagtcgtcagtaagtggctatgccccgaccccgaagcctgtttccccatctgtacaatggaaatgataaagacgcccatctgatagggtttttgtggcaaataaacatttggtttttttgttttgttttgttttgttttttgagatggaggtttgctctgtcgcccaggctggagtgcagtgacacaatctcatctcaccacaaccttcccctgcctcagcctcccaagtagctgggattacaagcatgtgccaccacacctggctaattttctatttttagtagagacgggtttctccatgttggtcagcctcagcctcccaagtaactgggattacaggcctgtgccaccacacccggctaattttttctatttttgacagggacggggtttcaccatgttggtcaggctggtctagaggtactggatcttgctaccagtggaacagccactaaggattctgcagtgagagcagagggccagctaagtggtactctcccagagactgtctgactcacgccaccccctccaccttggacacaggacgctgtggtttctgagccaggtacaatgactcctttcggtaagtgcagtggaagctgtacactgcccaggcaaagcgtccgggcagcgtaggcgggcgactcagatcccagccagtggacttagcccctgtttgctcctccgataactggggtgaccttggttaatattcaccagcagcctcccccgttgcccctctggatccactgcttaaatacggacgaggacagggccctgtctcctcagcttcaggcaccaccactgacctgggacagtgaataattactctaaggtaaatataaaatttttaagtgtataatgtgttaaactactgattctaattgtttctctcttttagattccaacctttggaactgagtttaaacgccgccaccatgcaaattgagttatccacctgtttcttcctctgtctcctgaggttctgcttctctgccaccaggagatactacctgggggctgtggagctgtcctgggactacatgcagtcagacctgggggagctgccagttgatgccaggttcccccccagagtccccaagtccttccccttcaacacctcagtggtgtacaaaaagaccctgtttgtggagttcacagaccacctgttcaacatagccaagcccaggcccccctggatgggcctgctgggccccaccatccaggcagaggtttatgacacagtggtcatcaccctgaagaacatggcctcccaccctgtgtccctccatgctgtgggggtgagctactggaaggccagtgagggggcagaatatgatgaccagaccagccagagggagaaggaggatgacaaggtgttcccagggggcagccacacctatgtgtggcaggtcctgaaggagaatggccccatggcctctgaccccctctgcctcacctactcctacctgtcccatgtggacctggtgaaggacctcaactctggcctgattggagccctcctggtgtgcagggaggggagcctggccaaggaaaagacccagaccctgcacaagtttatcctgctctttgcagtctttgatgaggggaagtcctggcacagtgagaccaagaactccctgatgcaggacagagatgctgcctcagccagggcctggcccaagatgcacacagtgaatgggtatgtcaacaggagcctgccaggcctgattgggtgccacagaaagtcagtgtactggcatgtcattggcatgggcaccaccccagaggtgcactccatcttcctggagggccacaccttcctggtgaggaaccacagacaggccagcctggagatcagcccaatcaccttcctcacagcccagaccctcctcatggacctgggccagtttctcctgagctgccacatctcctcccaccagcatgatggcatggaggcctatgtgaaggtggacagctgccctgaggagccccagctcaggatgaagaacaatgaggaggcagaggactatgatgatgatctgacagactctgagatggatgtggtgagatttgatgatgacaacagcccctccttcatccagatcaggtctgtggccaagaagcaccctaagacctgggtgcactacattgcagctgaggaggaggactgggactatgcccccctggtcctggcccctgatgataggtcctacaagtcccagtacctgaacaatggcccccagaggatagggagaaagtacaagaaggtgaggttcatggcctacactgatgagaccttcaagactagggaagccatccagcatgagtctgggatcctgggccccctcctctatggggaggtgggggacaccctgctgatcatcttcaagaaccaggccagcaggccctacaacatttacccccatgggatcacagatgtgagacccctgtacagcaggagactgccaaagggggtgaagcacctgaaggacttccccatcctgccaggggagatcttcaagtacaagtggactgtgacagtggaggatgggcccaccaaatctgaccctagatgcctgaccagatactacagcagctttgtgaacatggagagggacctggcctctggactgattggccctctgctgatctgctacaaggagagtgtggaccagaggggaaaccagatcatgtctgacaagaggaatgtgatcctgttctcagtgtttgatgagaacagatcctggtacctcactgagaacatccagaggttcctgcccaacccagcaggggtgcagctggaggacccagagttccaggcctccaacatcatgcactccatcaatggctatgtctttgactccctgcagctgtcagtgtgcctgcatgaggtggcctactggtacatcctctccattggagcccagactgacttcctgtcagtcttcttcagtggctacaccttcaagcacaagatggtctatgaggacactctgaccctgttccccttctctggggagactgtgttcatgtccatggagaaccctggactgtggatcctgggctgccacaacagtgacttcaggaacaggggcatgactgccctgctgaaggtctccagctgtgacaagaacactggggactactatgaggactcctatgaggacatctctgcctacctgctgtccaagaacaatgccattgagcccaggtccttctcccagaacagcagacacccctccaccaggcagaagcagttcaatgcaaccaccatccctgaaaataccaccctgcagagtgaccaggaggagattgactatgatgacaccatctctgtggagatgaagaaggaggactttgacatctatgatgaggatgagaaccagagccctagaagcttccagaagaagaccagacactacttcattgctgcagtggaaagactgtgggactatgggatgagctcctccccccatgtgctgaggaacagggcccagtctggctctgtgccccagttcaagaaggtggtgttccaggagttcactgatggctccttcacccagcccctgtacaggggagagctgaatgagcacctgggcctgctgggcccctacatcagggctgaggtggaggacaatatcatggtgaccttcagaaaccaggcctccagaccttactccttctacagcagcctgatctcctatgaggaggaccagagacagggggctgagcccaggaagaactttgtgaagcccaatgagaccaagacctacttctggaaggtgcagcaccacatggcccccaccaaggatgagtttgactgcaaggcctgggcctacttctctgatgtggacctggagaaggatgtgcactctggcctgattggccccctgctggtgtgccacaccaacaccctgaaccctgcccatggcaggcaggtgactgtgcaggagtttgccctgttcttcaccatctttgatgagaccaagagctggtacttcactgagaacatggagaggaactgcagggccccctgcaacatccagatggaggaccccaccttcaaggagaactacaggttccatgccatcaatggctacatcatggacaccctgcctggcctggtgatggcccaggaccagaggatcaggtggtacctgctgagcatggggagcaatgagaacatccacagcatccacttctctggccatgtgttcacagtgaggaagaaggaggagtacaagatggccctgtacaacctgtaccctggggtgtttgagacagtggagatgctgccctccaaggctggaatctggagggtggagtgcctgattggggagcacctgcatgctggcatgagcaccctgttcctggtgtacagcaacaagtgccagacccccctgggcatggcctctggccacatcagagacttccagatcacagcctcaggccagtatggccagtgggcccccaagctggccaggctgcactactctggcagcatcaatgcctggtccaccaaggagcccttcagctggatcaaggtggacctcctggcccccatgatcatccatggcatcaagacccagggggccaggcagaagttcagctccctgtacatctcccagttcatcatcatgtactccctggatggcaagaagtggcagacctacagaggcaacagcacaggcaccctgatggtgttctttggcaatgtggacagctctgggatcaagcacaacatcttcaacccccccatcattgccaggtacatcagactgcaccccacccactactccatcaggtccaccctgagaatggagctgatgggctgtgacctgaacagctgcagcatgcccctgggcatggagagcaaggccatctctgatgcccagatcacagccagcagctacttcaccaacatgtttgccacctggtcccccagcaaggccaggctgcacctgcagggcaggagcaatgcctggaggccccaggtgaacaaccccaaggagtggctgcaggtggacttccagaagaccatgaaggtgacaggggtgaccacccagggggtgaagtccctgctgaccagcatgtatgtgaaggagttcctgatcagcagctcccaggatggccaccagtggaccctgttcttccagaatggcaaggtgaaggtgttccagggcaaccaggacagcttcacccctgtggtgaactccctggacccccccctgctgaccagatacctgaggatccacccccagtcctgggtgcaccagattgccctgagaatggaggtgctgggctgtgaggcccaggacctgtactgattaattaagagcatcttaccgccatttattcccatatttgttctgtttttcttgatttgggtatacatttaaatgttaataaaacaaaatggtggggcaatcatttacatttttagggatatgtaattactagttcaggtgtattgccacaagacaaacatgttaagaaactttcccgttatttacgctctgttcctgttaatcaacctctggattacaaaatttgtgaaagattgactgatattcttaactatgttgctccttttacgctgtgtggatatgctgctttatagcctctgtatctagctattgcttcccgtacggctttcgttttctcctccttgtataaatcctggttgctgtctcttttagaggagttgtggcccgttgtccgtcaacgtggcgtggtgtgctctgtgtttgctgacgcaacccccactggctggggcattgccaccacctgtcaactcctttctgggactttcgctttccccctcccgatcgccacggcagaactcatcgccgcctgccttgcccgctgctggacaggggctaggttgctgggcactgataattccgtggtgttgtctgtgccttctagttgccagccatctgttgtttgcccctcccccgtgccttccttgaccctggaaggtgccactcccactgtcctttcctaataaaatgaggaaattgcatcgcattgtctgagtaggtgtcattctattctggggggtggggtggggcaggacagcaagggggaggattgggaagacaatagcaggcatgctggggatgcggtgggctctatggctctagagcatggctacgtagataagtagcatggcgggttaatcattaactacacctgcaggaggaacccctagtgatggagttggccactccctctctgcgcgctcgctcgctcactgaggccgggcgaccaaaggtcgcccgacgcccgggcggcctcagtgagcgagcgagcgcgcagctgcctgcagg

SEQ ID NO: 30 - DNA, 6870 bp, Artificial Sequence
  Description of Artificial Sequence: Synthetic polynucleotide
cctgcaggcagctgcgcgctcgctcgctcactgaggccgcccgggcaaagcccgggcgtcgggcgacctttggtcgcccggcctcagtgagcgagcgagcgcgcagagagggagtggccaactccatcactaggggttccttgtagttaatgattaacccgccatgctacttatcgcggccgcaggctcagaggcacacaggagtttctgggctcaccctgcccccttccaacccctcagttcccatcctccagcagctgtttgtgtgctgcctctgaagtccacactgaacaaacttcagcctactcatgtccctaaaatgggcaaacattgcaagcagcaaacagcaaacacacagccctccctgcctgctgaccttggagctggggcagaggtcagagacctctctgggcccatgccacctccaacatccactcgaccccttggaatttcggtggagaggagcagaggttgtcctggcgtggtttaggtagtgtgagagggtccgggttcaaaaccacttgctgggtggggagtcgtcagtaagtggctatgccccgaccccgaagcctgtttccccatctgtacaatggaaatgataaagacgcccatctgatagggtttttgtggcaaataaacatttggtttttttgttttgttttgttttgttttttgagatggaggtttgctctgtcgcccaggctggagtgcagtgacacaatctcatctcaccacaaccttcccctgcctcagcctcccaagtagctgggattacaagcatgtgccaccacacctggctaattttctatttttagtagagacgggtttctccatgttggtcagcctcagcctcccaagtaactgggattacaggcctgtgccaccacacccggctaattttttctatttttgacagggacggggtttcaccatgttggtcaggctggtctagaggtactggatcttgctaccagtggaacagccactaaggattctgcagtgagagcagagggccagctaagtggtactctcccagagactgtctgactcacgccaccccctccaccttggacacaggacgctgtggtttctgagccaggtacaatgactcctttcggtaagtgcagtggaagctgtacactgcccaggcaaagcgtccgggcagcgtaggcgggcgactcagatcccagccagtggacttagcccctgtttgctcctccgataactggggtgaccttggttaatattcaccagcagcctcccccgttgcccctctggatccactgcttaaatacggacgaggacagggccctgtctcctcagcttcaggcaccaccactgacctgggacagtgaataattactctaaggtaaatataaaatttttaagtgtataatgtgttaaactactgattctaattgtttctctcttttagattccaacctttggaactgagtttaaaccgcagccaccatgcaaattgagttatccacctgtttcttcctctgtctcctgaggttctgcttctctgccaccaggagatactacctgggggctgtggagctgtcctgggactacatgcagtcagacctgggggagctgccagttgatgccaggttcccccccagagtccccaagtccttccccttcaacacctcagtggtgtacaaaaagaccctgtttgtggagttcacagaccacctgttcaacatagccaagcccaggcccccctggatgggcctgctgggccccaccatccaggcagaggtttatgacacagtggtcatcaccctgaagaacatggcctcccaccctgtgtccctccatgctgtgggggtgagctactggaaggccagtgagggggcagaatatgatgaccagaccagccagagggagaaggaggatgacaaggtgttcccagggggcagccacacctatgtgtggcaggtcctgaaggagaatggccccatggcctctgaccccctctgcctcacctactcctacctgtcccatgtggacctggtgaaggacctcaactctggcctgattggagccctcctggtgtgcagggaggggagcctggccaaggaaaagacccagaccctgcacaagtttatcctgctctttgcagtctttgatgaggggaagtcctggcacagtgagaccaagaactccctgatgcaggacagagatgctgcctcagccagggcctggcccaagatgcacacagtgaatgggtatgtcaacaggagcctgccaggcctgattgggtgccacagaaagtcagtgtactggcatgtcattggcatgggcaccaccccagaggtgcactccatcttcctggagggccacaccttcctggtgaggaaccacagacaggccagcctggagatcagcccaatcaccttcctcacagcccagaccctcctcatggacctgggccagtttctcctgagctgccacatctcctcccaccagcatgatggcatggaggcctatgtgaaggtggacagctgccctgaggagccccagctcaggatgaagaacaatgaggaggcagaggactatgatgatgatctgacagactctgagatggatgtggtgagatttgatgatgacaacagcccctccttcatccagatcaggtctgtggccaagaagcaccctaagacctgggtgcactacattgcagctgaggaggaggactgggactatgcccccctggtcctggcccctgatgataggtcctacaagtcccagtacctgaacaatggcccccagaggatagggagaaagtacaagaaggtgaggttcatggcctacactgatgagaccttcaagactagggaagccatccagcatgagtctgggatcctgggccccctcctctatggggaggtgggggacaccctgctgatcatcttcaagaaccaggccagcaggccctacaacatttacccccatgggatcacagatgtgagacccctgtacagcaggagactgccaaagggggtgaagcacctgaaggacttccccatcctgccaggggagatcttcaagtacaagtggactgtgacagtggaggatgggcccaccaaatctgaccctagatgcctgaccagatactacagcagctttgtgaacatggagagggacctggcctctggactgattggccctctgctgatctgctacaaggagagtgtggaccagaggggaaaccagatcatgtctgacaagaggaatgtgatcctgttctcagtgtttgatgagaacagatcctggtacctcactgagaacatccagaggttcctgcccaacccagcaggggtgcagctggaggacccagagttccaggcctccaacatcatgcactccatcaatggctatgtctttgactccctgcagctgtcagtgtgcctgcatgaggtggcctactggtacatcctctccattggagcccagactgacttcctgtcagtcttcttcagtggctacaccttcaagcacaagatggtctatgaggacactctgaccctgttccccttctctggggagactgtgttcatgtccatggagaaccctggactgtggatcctgggctgccacaacagtgacttcaggaacaggggcatgactgccctgctgaaggtctccagctgtgacaagaacactggggactactatgaggactcctatgaggacatctctgcctacctgctgtccaagaacaatgccattgagcccaggtccttctcccagaacagcagacacccctccaccaggcagaagcagttcaatgcaaccaccatccctgaaaataccaccctgcagagtgaccaggaggagattgactatgatgacaccatctctgtggagatgaagaaggaggactttgacatctatgatgaggatgagaaccagagccctagaagcttccagaagaagaccagacactacttcattgctgcagtggaaagactgtgggactatgggatgagctcctccccccatgtgctgaggaacagggcccagtctggctctgtgccccagttcaagaaggtggtgttccaggagttcactgatggctccttcacccagcccctgtacaggggagagctgaatgagcacctgggcctgctgggcccctacatcagggctgaggtggaggacaatatcatggtgaccttcagaaaccaggcctccagaccttactccttctacagcagcctgatctcctatgaggaggaccagagacagggggctgagcccaggaagaactttgtgaagcccaatgagaccaagacctacttctggaaggtgcagcaccacatggcccccaccaaggatgagtttgactgcaaggcctgggcctacttctctgatgtggacctggagaaggatgtgcactctggcctgattggccccctgctggtgtgccacaccaacaccctgaaccctgcccatggcaggcaggtgactgtgcaggagtttgccctgttcttcaccatctttgatgagaccaagagctggtacttcactgagaacatggagaggaactgcagggccccctgcaacatccagatggaggaccccaccttcaaggagaactacaggttccatgccatcaatggctacatcatggacaccctgcctggcctggtgatggcccaggaccagaggatcaggtggtacctgctgagcatggggagcaatgagaacatccacagcatccacttctctggccatgtgttcacagtgaggaagaaggaggagtacaagatggccctgtacaacctgtaccctggggtgtttgagacagtggagatgctgccctccaaggctggaatctggagggtggagtgcctgattggggagcacctgcatgctggcatgagcaccctgttcctggtgtacagcaacaagtgccagacccccctgggcatggcctctggccacatcagagacttccagatcacagcctcaggccagtatggccagtgggcccccaagctggccaggctgcactactctggcagcatcaatgcctggtccaccaaggagcccttcagctggatcaaggtggacctcctggcccccatgatcatccatggcatcaagacccagggggccaggcagaagttcagctccctgtacatctcccagttcatcatcatgtactccctggatggcaagaagtggcagacctacagaggcaacagcacaggcaccctgatggtgttctttggcaatgtggacagctctgggatcaagcacaacatcttcaacccccccatcattgccaggtacatcagactgcaccccacccactactccatcaggtccaccctgagaatggagctgatgggctgtgacctgaacagctgcagcatgcccctgggcatggagagcaaggccatctctgatgcccagatcacagccagcagctacttcaccaacatgtttgccacctggtcccccagcaaggccaggctgcacctgcagggcaggagcaatgcctggaggccccaggtgaacaaccccaaggagtggctgcaggtggacttccagaagaccatgaaggtgacaggggtgaccacccagggggtgaagtccctgctgaccagcatgtatgtgaaggagttcctgatcagcagctcccaggatggccaccagtggaccctgttcttccagaatggcaaggtgaaggtgttccagggcaaccaggacagcttcacccctgtggtgaactccctggacccccccctgctgaccagatacctgaggatccacccccagtcctgggtgcaccagattgccctgagaatggaggtgctgggctgtgaggcccaggacctgtactgattaattaagagcatcttaccgccatttattcccatatttgttctgtttttcttgatttgggtatacatttaaatgttaataaaacaaaatggtggggcaatcatttacatttttagggatatgtaattactagttcaggtgtattgccacaagacaaacatgttaagaaactttcccgttatttacgctctgttcctgttaatcaacctctggattacaaaatttgtgaaagattgactgatattcttaactatgttgctccttttacgctgtgtggatatgctgctttatagcctctgtatctagctattgcttcccgtacggctttcgttttctcctccttgtataaatcctggttgctgtctcttttagaggagttgtggcccgttgtccgtcaacgtggcgtggtgtgctctgtgtttgctgacgcaacccccactggctggggcattgccaccacctgtcaactcctttctgggactttcgctttccccctcccgatcgccacggcagaactcatcgccgcctgccttgcccgctgctggacaggggctaggttgctgggcactgataattccgtggtgttgtctgtgccttctagttgccagccatctgttgtttgcccctcccccgtgccttccttgaccctggaaggtgccactcccactgtcctttcctaataaaatgaggaaattgcatcgcattgtctgagtaggtgtcattctattctggggggtggggtggggcaggacagcaagggggaggattgggaagacaatagcaggcatgctggggatgcggtgggctctatggctctagagcatggctacgtagataagtagcatggcgggttaatcattaactacacctgcaggaggaacccctagtgatggagttggccactccctctctgcgcgctcgctcgctcactgaggccgggcgaccaaaggtcgcccgacgcccgggcggcctcagtgagcgagcgagcgcgcagctgcctgcagg

SEQ ID NO: 31 - DNA, 6870 bp, Artificial Sequence
  Description of Artificial Sequence: Synthetic polynucleotide
cctgcaggcagctgcgcgctcgctcgctcactgaggccgcccgggcaaagcccgggcgtcgggcgacctttggtcgcccggcctcagtgagcgagcgagcgcgcagagagggagtggccaactccatcactaggggttccttgtagttaatgattaacccgccatgctacttatcgcggccgcaggctcagaggcacacaggagtttctgggctcaccctgcccccttccaacccctcagttcccatcctccagcagctgtttgtgtgctgcctctgaagtccacactgaacaaacttcagcctactcatgtccctaaaatgggcaaacattgcaagcagcaaacagcaaacacacagccctccctgcctgctgaccttggagctggggcagaggtcagagacctctctgggcccatgccacctccaacatccactcgaccccttggaatttcggtggagaggagcagaggttgtcctggcgtggtttaggtagtgtgagagggtccgggttcaaaaccacttgctgggtggggagtcgtcagtaagtggctatgccccgaccccgaagcctgtttccccatctgtacaatggaaatgataaagacgcccatctgatagggtttttgtggcaaataaacatttggtttttttgttttgttttgttttgttttttgagatggaggtttgctctgtcgcccaggctggagtgcagtgacacaatctcatctcaccacaaccttcccctgcctcagcctcccaagtagctgggattacaagcatgtgccaccacacctggctaattttctatttttagtagagacgggtttctccatgttggtcagcctcagcctcccaagtaactgggattacaggcctgtgccaccacacccggctaattttttctatttttgacagggacggggtttcaccatgttggtcaggctggtctagaggtactggatcttgctaccagtggaacagccactaaggattctgcagtgagagcagagggccagctaagtggtactctcccagagactgtctgactcacgccaccccctccaccttggacacaggacgctgtggtttctgagccaggtacaatgactcctttcggtaagtgcagtggaagctgtacactgcccaggcaaagcgtccgggcagcgtaggcgggcgactcagatcccagccagtggacttagcccctgtttgctcctccgataactggggtgaccttggttaatattcaccagcagcctcccccgttgcccctctggatccactgcttaaatacggacgaggacagggccctgtctcctcagcttcaggcaccaccactgacctgggacagtgaataattactctaaggtaaatataaaatttttaagtgtataatgtgttaaactactgattctaattgtttctctcttttagattccaacctttggaactgagtttaaaccgcagccaccatgcagattgagctgagcacctgcttcttcctgtgcctgctgaggttctgcttctctgccaccaggagatactacctgggggctgtggagctgagctgggactacatgcagtctgacctgggggagctgcctgtggatgccaggttcccccccagagtgcccaagagcttccccttcaacacctctgtggtgtacaagaagaccctgtttgtggagttcactgaccacctgttcaacattgccaagcccaggcccccctggatgggcctgctgggccccaccatccaggctgaggtgtatgacactgtggtgatcaccctgaagaacatggccagccaccctgtgagcctgcatgctgtgggggtgagctactggaaggcctctgagggggctgagtatgatgaccagaccagccagagggagaaggaggatgacaaggtgttccctgggggcagccacacctatgtgtggcaggtgctgaaggagaatggccccatggcctctgaccccctgtgcctgacctacagctacctgagccatgtggacctggtgaaggacctgaactctggcctgattggggccctgctggtgtgcagggagggcagcctggccaaggagaagacccagaccctgcacaagttcatcctgctgtttgctgtgtttgatgagggcaagagctggcactctgaaaccaagaacagcctgatgcaggacagggatgctgcctctgccagggcctggcccaagatgcacactgtgaatggctatgtgaacaggagcctgcctggcctgattggctgccacaggaagtctgtgtactggcatgtgattggcatgggcaccacccctgaggtgcacagcatcttcctggagggccacaccttcctggtcaggaaccacaggcaggccagcctggagatcagccccatcaccttcctgactgcccagaccctgctgatggacctgggccagttcctgctgagctgccacatcagcagccaccagcatgatggcatggaggcctatgtgaaggtggacagctgccctgaggagccccagctgaggatgaagaacaatgaggaggctgaggactatgatgatgacctgactgactctgagatggatgtggtgaggtttgatgatgacaacagccccagcttcatccagatcaggtctgtggccaagaagcaccccaagacctgggtgcactacattgctgctgaggaggaggactgggactatgcccccctggtgctggcccctgatgacaggagctacaagagccagtacctgaacaatggcccccagaggattggcaggaagtacaagaaggtcaggttcatggcctacactgatgaaaccttcaagaccagggaggccatccagcatgagtctggcatcctgggccccctgctgtatggggaggtgggggacaccctgctgatcatcttcaagaaccaggccagcaggccctacaacatctacccccatggcatcactgatgtgaggcccctgtacagcaggaggctgcccaagggggtgaagcacctgaaggacttccccatcctgcctggggagatcttcaagtacaagtggactgtgactgtggaggatggccccaccaagtctgaccccaggtgcctgaccagatactacagcagctttgtgaacatggagagggacctggcctctggcctgattggccccctgctgatctgctacaaggagtctgtggaccagaggggcaaccagatcatgtctgacaagaggaatgtgatcctgttctctgtgtttgatgagaacaggagctggtacctgactgagaacatccagaggttcctgcccaaccctgctggggtgcagctggaggaccctgagttccaggccagcaacatcatgcacagcatcaatggctatgtgtttgacagcctgcagctgtctgtgtgcctgcatgaggtggcctactggtacatcctgagcattggggcccagactgacttcctgtctgtgttcttctctggctacaccttcaagcacaagatggtgtatgaggacaccctgaccctgttccccttctctggggagactgtgttcatgagcatggagaaccctggcctgtggattctgggctgccacaactctgacttcaggaacaggggcatgactgccctgctgaaagtctccagctgtgacaagaacactggggactactatgaggacagctatgaggacatctctgcctacctgctgagcaagaacaatgccattgagcccaggagcttcagccagaatagcaggcaccccagcaccaggcagaagcagttcaatgccaccaccatcccagagaataccaccctgcagtctgaccaggaggagattgactatgatgacaccatctctgtggagatgaagaaggaggactttgacatctacgacgaggacgagaaccagagccccaggagcttccagaagaagaccaggcactacttcattgctgctgtggagaggctgtgggactatggcatgagcagcagcccccatgtgctgaggaacagggcccagtctggctctgtgccccagttcaagaaggtggtgttccaggagttcactgatggcagcttcacccagcccctgtacagaggggagctgaatgagcacctgggcctgctgggcccctacatcagggctgaggtggaggacaacatcatggtgaccttcaggaaccaggccagcaggccctacagcttctacagcagcctgatcagctatgaggaggaccagaggcagggggctgagcccaggaagaactttgtgaagcccaatgaaaccaagacctacttctggaaggtgcagcaccacatggcccccaccaaggatgagtttgactgcaaggcctgggcctacttctctgatgtggacctggagaaggatgtgcactctggcctgattggccccctgctggtgtgccacaccaacaccctgaaccctgcccatggcaggcaggtgactgtgcaggagtttgccctgttcttcaccatctttgatgaaaccaagagctggtacttcactgagaacatggagaggaactgcagggccccctgcaacatccagatggaggaccccaccttcaaggagaactacaggttccatgccatcaatggctacatcatggacaccctgcctggcctggtgatggcccaggaccagaggatcaggtggtacctgctgagcatgggcagcaatgagaacatccacagcatccacttctctggccatgtgttcactgtgaggaagaaggaggagtacaagatggccctgtacaacctgtaccctggggtgtttgagactgtggagatgctgcccagcaaggctggcatctggagggtggagtgcctgattggggagcacctgcatgctggcatgagcaccctgttcctggtgtacagcaacaagtgccagacccccctgggcatggcctctggccacatcagggacttccagatcactgcctctggccagtatggccagtgggcccccaagctggccaggctgcactactctggcagcatcaatgcctggagcaccaaggagcccttcagctggatcaaggtggacctgctggcccccatgatcatccatggcatcaagacccagggggccaggcagaagttcagcagcctgtacatcagccagttcatcatcatgtacagcctggatggcaagaagtggcagacctacaggggcaacagcactggcaccctgatggtgttctttggcaatgtggacagctctggcatcaagcacaacatcttcaacccccccatcattgccagatacatcaggctgcaccccacccactacagcatcaggagcaccctgaggatggagctgatgggctgtgacctgaacagctgcagcatgcccctgggcatggagagcaaggccatctctgatgcccagatcactgccagcagctacttcaccaacatgtttgccacctggagccccagcaaggccaggctgcacctgcagggcaggagcaatgcctggaggccccaggtcaacaaccccaaggagtggctgcaggtggacttccagaagaccatgaaggtgactggggtgaccacccagggggtgaagagcctgctgaccagcatgtatgtgaaggagttcctgatcagcagcagccaggatggccaccagtggaccctgttcttccagaatggcaaggtgaaggtgttccagggcaaccaggacagcttcacccctgtggtgaacagcctggacccccccctgctgaccagatacctgaggattcacccccagagctgggtgcaccagattgccctgaggatggaggtgctgggctgtgaggcccaggacctgtactgattaattaagagcatcttaccgccatttattcccatatttgttctgtttttcttgatttgggtatacatttaaatgttaataaaacaaaatggtggggcaatcatttacatttttagggatatgtaattactagttcaggtgtattgccacaagacaaacatgttaagaaactttcccgttatttacgctctgttcctgttaatcaacctctggattacaaaatttgtgaaagattgactgatattcttaactatgttgctccttttacgctgtgtggatatgctgctttatagcctctgtatctagctattgcttcccgtacggctttcgttttctcctccttgtataaatcctggttgctgtctcttttagaggagttgtggcccgttgtccgtcaacgtggcgtggtgtgctctgtgtttgctgacgcaacccccactggctggggcattgccaccacctgtcaactcctttctgggactttcgctttccccctcccgatcgccacggcagaactcatcgccgcctgccttgcccgctgctggacaggggctaggttgctgggcactgataattccgtggtgttgtctgtgccttctagttgccagccatctgttgtttgcccctcccccgtgccttccttgaccctggaaggtgccactcccactgtcctttcctaataaaatgaggaaattgcatcgcattgtctgagtaggtgtcattctattctggggggtggggtggggcaggacagcaagggggaggattgggaagacaatagcaggcatgctggggatgcggtgggctctatggctctagagcatggctacgtagataagtagcatggcgggttaatcattaactacacctgcaggaggaacccctagtgatggagttggccactccctctctgcgcgctcgctcgctcactgaggccgggcgaccaaaggtcgcccgacgcccgggcggcctcagtgagcgagcgagcgcgcagctgcctgcagg

SEQ ID NO: 32 - DNA, 6855 bp, Artificial Sequence
  Description of Artificial Sequence: Synthetic polynucleotide
cctgcaggcagctgcgcgctcgctcgctcactgaggccgcccgggcaaagcccgggcgtcgggcgacctttggtcgcccggcctcagtgagcgagcgagcgcgcagagagggagtggccaactccatcactaggggttccttgtagttaatgattaacccgccatgctacttatcgcggccgcaggctcagaggcacacaggagtttctgggctcaccctgcccccttccaacccctcagttcccatcctccagcagctgtttgtgtgctgcctctgaagtccacactgaacaaacttcagcctactcatgtccctaaaatgggcaaacattgcaagcagcaaacagcaaacacacagccctccctgcctgctgaccttggagctggggcagaggtcagagacctctctgggcccatgccacctccaacatccactcgaccccttggaatttcggtggagaggagcagaggttgtcctggcgtggtttaggtagtgtgagagggtccgggttcaaaaccacttgctgggtggggagtcgtcagtaagtggctatgccccgaccccgaagcctgtttccccatctgtacaatggaaatgataaagacgcccatctgatagggtttttgtggcaaataaacatttggtttttttgttttgttttgttttgttttttgagatggaggtttgctctgtcgcccaggctggagtgcagtgacacaatctcatctcaccacaaccttcccctgcctcagcctcccaagtagctgggattacaagcatgtgccaccacacctggctaattttctatttttagtagagacgggtttctccatgttggtcagcctcagcctcccaagtaactgggattacaggcctgtgccaccacacccggctaattttttctatttttgacagggacggggtttcaccatgttggtcaggctggtctagaggtactggatcttgctaccagtggaacagccactaaggattctgcagtgagagcagagggccagctaagtggtactctcccagagactgtctgactcacgccaccccctccaccttggacacaggacgctgtggtttctgagccaggtacaatgactcctttcggtaagtgcagtggaagctgtacactgcccaggcaaagcgtccgggcagcgtaggcgggcgactcagatcccagccagtggacttagcccctgtttgctcctccgataactggggtgaccttggttaatattcaccagcagcctcccccgttgcccctctggatccactgcttaaatacggacgaggacagggccctgtctcctcagcttcaggcaccaccactgacctgggacagtgaataattactctaaggtaaatataaaatttttaagtgtataatgtgttaaactactgattctaattgtttctctcttttagattccaacctttggaactgaaccatgcagattgagctgagcacctgcttcttcctgtgcctgctgaggttctgcttctctgccaccaggagatactacctgggggctgtggagctgagctgggactacatgcagtctgacctgggggagctgcctgtggatgccaggttcccccccagagtgcccaagagcttccccttcaacacctctgtggtgtacaagaagaccctgtttgtggagttcactgaccacctgttcaacattgccaagcccaggcccccctggatgggcctgctgggccccaccatccaggctgaggtgtatgacactgtggtgatcaccctgaagaacatggccagccaccctgtgagcctgcatgctgtgggggtgagctactggaaggcctctgagggggctgagtatgatgaccagaccagccagagggagaaggaggatgacaaggtgttccctgggggcagccacacctatgtgtggcaggtgctgaaggagaatggccccatggcctctgaccccctgtgcctgacctacagctacctgagccatgtggacctggtgaaggacctgaactctggcctgattggggccctgctggtgtgcagggagggcagcctggccaaggagaagacccagaccctgcacaagttcatcctgctgtttgctgtgtttgatgagggcaagagctggcactctgaaaccaagaacagcctgatgcaggacagggatgctgcctctgccagggcctggcccaagatgcacactgtgaatggctatgtgaacaggagcctgcctggcctgattggctgccacaggaagtctgtgtactggcatgtgattggcatgggcaccacccctgaggtgcacagcatcttcctggagggccacaccttcctggtcaggaaccacaggcaggccagcctggagatcagccccatcaccttcctgactgcccagaccctgctgatggacctgggccagttcctgctgagctgccacatcagcagccaccagcatgatggcatggaggcctatgtgaaggtggacagctgccctgaggagccccagctgaggatgaagaacaatgaggaggctgaggactatgatgatgacctgactgactctgagatggatgtggtgaggtttgatgatgacaacagccccagcttcatccagatcaggtctgtggccaagaagcaccccaagacctgggtgcactacattgctgctgaggaggaggactgggactatgcccccctggtgctggcccctgatgacaggagctacaagagccagtacctgaacaatggcccccagaggattggcaggaagtacaagaaggtcaggttcatggcctacactgatgaaaccttcaagaccagggaggccatccagcatgagtctggcatcctgggccccctgctgtatggggaggtgggggacaccctgctgatcatcttcaagaaccaggccagcaggccctacaacatctacccccatggcatcactgatgtgaggcccctgtacagcaggaggctgcccaagggggtgaagcacctgaaggacttccccatcctgcctggggagatcttcaagtacaagtggactgtgactgtggaggatggccccaccaagtctgaccccaggtgcctgaccagatactacagcagctttgtgaacatggagagggacctggcctctggcctgattggccccctgctgatctgctacaaggagtctgtggaccagaggggcaaccagatcatgtctgacaagaggaatgtgatcctgttctctgtgtttgatgagaacaggagctggtacctgactgagaacatccagaggttcctgcccaaccctgctggggtgcagctggaggaccctgagttccaggccagcaacatcatgcacagcatcaatggctatgtgtttgacagcctgcagctgtctgtgtgcctgcatgaggtggcctactggtacatcctgagcattggggcccagactgacttcctgtctgtgttcttctctggctacaccttcaagcacaagatggtgtatgaggacaccctgaccctgttccccttctctggggagactgtgttcatgagcatggagaaccctggcctgtggattctgggctgccacaactctgacttcaggaacaggggcatgactgccctgctgaaagtctccagctgtgacaagaacactggggactactatgaggacagctatgaggacatctctgcctacctgctgagcaagaacaatgccattgagcccaggagcttcagccagaatagcaggcaccccagcaccaggcagaagcagttcaatgccaccaccatcccagagaataccaccctgcagtctgaccaggaggagattgactatgatgacaccatctctgtggagatgaagaaggaggactttgacatctacgacgaggacgagaaccagagccccaggagcttccagaagaagaccaggcactacttcattgctgctgtggagaggctgtgggactatggcatgagcagcagcccccatgtgctgaggaacagggcccagtctggctctgtgccccagttcaagaaggtggtgttccaggagttcactgatggcagcttcacccagcccctgtacagaggggagctgaatgagcacctgggcctgctgggcccctacatcagggctgaggtggaggacaacatcatggtgaccttcaggaaccaggccagcaggccctacagcttctacagcagcctgatcagctatgaggaggaccagaggcagggggctgagcccaggaagaactttgtgaagcccaatgaaaccaagacctacttctggaaggtgcagcaccacatggcccccaccaaggatgagtttgactgcaaggcctgggcctacttctctgatgtggacctggagaaggatgtgcactctggcctgattggccccctgctggtgtgccacaccaacaccctgaaccctgcccatggcaggcaggtgactgtgcaggagtttgccctgttcttcaccatctttgatgaaaccaagagctggtacttcactgagaacatggagaggaactgcagggccccctgcaacatccagatggaggaccccaccttcaaggagaactacaggttccatgccatcaatggctacatcatggacaccctgcctggcctggtgatggcccaggaccagaggatcaggtggtacctgctgagcatgggcagcaatgagaacatccacagcatccacttctctggccatgtgttcactgtgaggaagaaggaggagtacaagatggccctgtacaacctgtaccctggggtgtttgagactgtggagatgctgcccagcaaggctggcatctggagggtggagtgcctgattggggagcacctgcatgctggcatgagcaccctgttcctggtgtacagcaacaagtgccagacccccctgggcatggcctctggccacatcagggacttccagatcactgcctctggccagtatggccagtgggcccccaagctggccaggctgcactactctggcagcatcaatgcctggagcaccaaggagcccttcagctggatcaaggtggacctgctggcccccatgatcatccatggcatcaagacccagggggccaggcagaagttcagcagcctgtacatcagccagttcatcatcatgtacagcctggatggcaagaagtggcagacctacaggggcaacagcactggcaccctgatggtgttctttggcaatgtggacagctctggcatcaagcacaacatcttcaacccccccatcattgccagatacatcaggctgcaccccacccactacagcatcaggagcaccctgaggatggagctgatgggctgtgacctgaacagctgcagcatgcccctgggcatggagagcaaggccatctctgatgcccagatcactgccagcagctacttcaccaacatgtttgccacctggagccccagcaaggccaggctgcacctgcagggcaggagcaatgcctggaggccccaggtcaacaaccccaaggagtggctgcaggtggacttccagaagaccatgaaggtgactggggtgaccacccagggggtgaagagcctgctgaccagcatgtatgtgaaggagttcctgatcagcagcagccaggatggccaccagtggaccctgttcttccagaatggcaaggtgaaggtgttccagggcaaccaggacagcttcacccctgtggtgaacagcctggacccccccctgctgaccagatacctgaggattcacccccagagctgggtgcaccagattgccctgaggatggaggtgctgggctgtgaggcccaggacctgtactgattaattaagagcatcttaccgccatttattcccatatttgttctgtttttcttgatttgggtatacatttaaatgttaataaaacaaaatggtggggcaatcatttacatttttagggatatgtaattactagttcaggtgtattgccacaagacaaacatgttaagaaactttcccgttatttacgctctgttcctgttaatcaacctctggattacaaaatttgtgaaagattgactgatattcttaactatgttgctccttttacgctgtgtggatatgctgctttatagcctctgtatctagctattgcttcccgtacggctttcgttttctcctccttgtataaatcctggttgctgtctcttttagaggagttgtggcccgttgtccgtcaacgtggcgtggtgtgctctgtgtttgctgacgcaacccccactggctggggcattgccaccacctgtcaactcctttctgggactttcgctttccccctcccgatcgccacggcagaactcatcgccgcctgccttgcccgctgctggacaggggctaggttgctgggcactgataattccgtggtgttgtctgtgccttctagttgccagccatctgttgtttgcccctcccccgtgccttccttgaccctggaaggtgccactcccactgtcctttcctaataaaatgaggaaattgcatcgcattgtctgagtaggtgtcattctattctggggggtggggtggggcaggacagcaagggggaggattgggaagacaatagcaggcatgctggggatgcggtgggctctatggctctagagcatggctacgtagataagtagcatggcgggttaatcattaactacacctgcaggaggaacccctagtgatggagttggccactccctctctgcgcgctcgctcgctcactgaggccgggcgaccaaaggtcgcccgacgcccgggcggcctcagtgagcgagcgagcgcgcagctgcctgcagg

SEQ ID NO: 33 - DNA, 6393 bp, Artificial Sequence
  Description of Artificial Sequence: Synthetic polynucleotide
cctgcaggcagctgcgcgctcgctcgctcactgaggccgcccgggcaaagcccgggcgtcgggcgacctttggtcgcccggcctcagtgagcgagcgagcgcgcagagagggagtggccaactccatcactaggggttccttgtagttaatgattaacccgccatgctacttatcgcggccgcaggctcagaggcacacaggagtttctgggctcaccctgcccccttccaacccctcagttcccatcctccagcagctgtttgtgtgctgcctctgaagtccacactgaacaaacttcagcctactcatgtccctaaaatgggcaaacattgcaagcagcaaacagcaaacacacagccctccctgcctgctgaccttggagctggggcagaggtcagagacctctctgggcccatgccacctccaacatccactcgaccccttggaatttcggtggagaggagcagaggttgtcctggcgtggtttaggtagtgtgagagggtccgggttcaaaaccacttgctgggtggggagtcgtcagtaagtggctatgccccgaccccgaagcctgtttccccatctgtacaatggaaatgataaagacgcccatctgatagggtttttgtggcaaataaacatttggtttttttgttttgttttgttttgttttttgagatggaggtttgctctgtcgcccaggctggagtgcagtgacacaatctcatctcaccacaaccttcccctgcctcagcctcccaagtagctgggattacaagcatgtgccaccacacctggctaattttctatttttagtagagacgggtttctccatgttggtcagcctcagcctcccaagtaactgggattacaggcctgtgccaccacacccggctaattttttctatttttgacagggacggggtttcaccatgttggtcaggctggtctagaggtactggatcttgctaccagtggaacagccactaaggattctgcagtgagagcagagggccagctaagtggtactctcccagagactgtctgactcacgccaccccctccaccttggacacaggacgctgtggtttctgagccaggtacaatgactcctttcggtaagtgcagtggaagctgtacactgcccaggcaaagcgtccgggcagcgtaggcgggcgactcagatcccagccagtggacttagcccctgtttgctcctccgataactggggtgaccttggttaatattcaccagcagcctcccccgttgcccctctggatccactgcttaaatacggacgaggacagggccctgtctcctcagcttcaggcaccaccactgacctgggacagtgaataattactctaaggtaaatataaaatttttaagtgtataatgtgttaaactactgattctaattgtttctctcttttagattccaacctttggaactgagtttaaaccgcagccaccatgcaaattgagttatccacctgtttcttcctctgtctcctgaggttctgcttctctgccaccaggagatactacctgggggctgtggagctgtcctgggactacatgcagtcagacctgggggagctgccagttgatgccaggttcccccccagagtccccaagtccttccccttcaacacctcagtggtgtacaaaaagaccctgtttgtggagttcacagaccacctgttcaacatagccaagcccaggcccccctggatgggcctgctgggccccaccatccaggcagaggtttatgacacagtggtcatcaccctgaagaacatggcctcccaccctgtgtccctccatgctgtgggggtgagctactggaaggccagtgagggggcagaatatgatgaccagaccagccagagggagaaggaggatgacaaggtgttcccagggggcagccacacctatgtgtggcaggtcctgaaggagaatggccccatggcctctgaccccctctgcctcacctactcctacctgtcccatgtggacctggtgaaggacctcaactctggcctgattggagccctcctggtgtgcagggaggggagcctggccaaggaaaagacccagaccctgcacaagtttatcctgctctttgcagtctttgatgaggggaagtcctggcacagtgagaccaagaactccctgatgcaggacagagatgctgcctcagccagggcctggcccaagatgcacacagtgaatgggtatgtcaacaggagcctgccaggcctgattgggtgccacagaaagtcagtgtactggcatgtcattggcatgggcaccaccccagaggtgcactccatcttcctggagggccacaccttcctggtgaggaaccacagacaggccagcctggagatcagcccaatcaccttcctcacagcccagaccctcctcatggacctgggccagtttctcctgagctgccacatctcctcccaccagcatgatggcatggaggcctatgtgaaggtggacagctgccctgaggagccccagctcaggatgaagaacaatgaggaggcagaggactatgatgatgatctgacagactctgagatggatgtggtgagatttgatgatgacaacagcccctccttcatccagatcaggtctgtggccaagaagcaccctaagacctgggtgcactacattgcagctgaggaggaggactgggactatgcccccctggtcctggcccctgatgataggtcctacaagtcccagtacctgaacaatggcccccagaggatagggagaaagtacaagaaggtgaggttcatggcctacactgatgagaccttcaagactagggaagccatccagcatgagtctgggatcctgggccccctcctctatggggaggtgggggacaccctgctgatcatcttcaagaaccaggccagcaggccctacaacatttacccccatgggatcacagatgtgagacccctgtacagcaggagactgccaaagggggtgaagcacctgaaggacttccccatcctgccaggggagatcttcaagtacaagtggactgtgacagtggaggatgggcccaccaaatctgaccctagatgcctgaccagatactacagcagctttgtgaacatggagagggacctggcctctggactgattggccctctgctgatctgctacaaggagagtgtggaccagaggggaaaccagatcatgtctgacaagaggaatgtgatcctgttctcagtgtttgatgagaacagatcctggtacctcactgagaacatccagaggttcctgcccaacccagcaggggtgcagctggaggacccagagttccaggcctccaacatcatgcactccatcaatggctatgtctttgactccctgcagctgtcagtgtgcctgcatgaggtggcctactggtacatcctctccattggagcccagactgacttcctgtcagtcttcttcagtggctacaccttcaagcacaagatggtctatgaggacactctgaccctgttccccttctctggggagactgtgttcatgtccatggagaaccctggactgtggatcctgggctgccacaacagtgacttcaggaacaggggcatgactgccctgctgaaggtctccagctgtgacaagaacactggggactactatgaggactcctatgaggacatctctgcctacctgctgtccaagaacaatgccattgagcccaggtccttctcccagaacagcagacacccctccaccaggcagaagcagttcaatgcaaccaccatccctgaaaataccaccctgcagagtgaccaggaggagattgactatgatgacaccatctctgtggagatgaagaaggaggactttgacatctatgatgaggatgagaaccagagccctagaagcttccagaagaagaccagacactacttcattgctgcagtggaaagactgtgggactatgggatgagctcctccccccatgtgctgaggaacagggcccagtctggctctgtgccccagttcaagaaggtggtgttccaggagttcactgatggctccttcacccagcccctgtacaggggagagctgaatgagcacctgggcctgctgggcccctacatcagggctgaggtggaggacaatatcatggtgaccttcagaaaccaggcctccagaccttactccttctacagcagcctgatctcctatgaggaggaccagagacagggggctgagcccaggaagaactttgtgaagcccaatgagaccaagacctacttctggaaggtgcagcaccacatggcccccaccaaggatgagtttgactgcaaggcctgggcctacttctctgatgtggacctggagaaggatgtgcactctggcctgattggccccctgctggtgtgccacaccaacaccctgaaccctgcccatggcaggcaggtgactgtgcaggagtttgccctgttcttcaccatctttgatgagaccaagagctggtacttcactgagaacatggagaggaactgcagggccccctgcaacatccagatggaggaccccaccttcaaggagaactacaggttccatgccatcaatggctacatcatggacaccctgcctggcctggtgatggcccaggaccagaggatcaggtggtacctgctgagcatggggagcaatgagaacatccacagcatccacttctctggccatgtgttcacagtgaggaagaaggaggagtacaagatggccctgtacaacctgtaccctggggtgtttgagacagtggagatgctgccctccaaggctggaatctggagggtggagtgcctgattggggagcacctgcatgctggcatgagcaccctgttcctggtgtacagcaacaagtgccagacccccctgggcatggcctctggccacatcagagacttccagatcacagcctcaggccagtatggccagtgggcccccaagctggccaggctgcactactctggcagcatcaatgcctggtccaccaaggagcccttcagctggatcaaggtggacctcctggcccccatgatcatccatggcatcaagacccagggggccaggcagaagttcagctccctgtacatctcccagttcatcatcatgtactccctggatggcaagaagtggcagacctacagaggcaacagcacaggcaccctgatggtgttctttggcaatgtggacagctctgggatcaagcacaacatcttcaacccccccatcattgccaggtacatcagactgcaccccacccactactccatcaggtccaccctgagaatggagctgatgggctgtgacctgaacagctgcagcatgcccctgggcatggagagcaaggccatctctgatgcccagatcacagccagcagctacttcaccaacatgtttgccacctggtcccccagcaaggccaggctgcacctgcagggcaggagcaatgcctggaggccccaggtgaacaaccccaaggagtggctgcaggtggacttccagaagaccatgaaggtgacaggggtgaccacccagggggtgaagtccctgctgaccagcatgtatgtgaaggagttcctgatcagcagctcccaggatggccaccagtggaccctgttcttccagaatggcaaggtgaaggtgttccagggcaaccaggacagcttcacccctgtggtgaactccctggacccccccctgctgaccagatacctgaggatccacccccagtcctgggtgcaccagattgccctgagaatggaggtgctgggctgtgaggcccaggacctgtactgattaattaagctcgctttcttgctgtccaatttctattaaaggttcctttgttccctaagtccaactactaaactgggggatattatgaagggccttgagcatctggattctgcctcagacatgataagatacattgatgagtttggacaaaccacaactagaatgcagtgaaaaaaatgctttatttgtgaaatttgtgatgctattgctttatttgtaaccattataagctgcaataaacaagttaacaacaacaattgcattcattttatgtttcaggttcagggggagatgtgggaggttttttaaagcaagtaaaacctctacaaatgtggtatctagagcatggctacgtagataagtagcatggcgggttaatcattaactacacctgcaggaggaacccctagtgatggagttggccactccctctctgcgcgctcgctcgctcactgaggccgggcgaccaaaggtcgcccgacgcccgggcggcctcagtgagcgagcgagcgcgcagctgcctgcagg

SEQ ID NO: 34 - DNA, 6390 bp, Artificial Sequence
  Description of Artificial Sequence: Synthetic polynucleotide
cctgcaggcagctgcgcgctcgctcgctcactgaggccgcccgggcaaagcccgggcgtcgggcgacctttggtcgcccggcctcagtgagcgagcgagcgcgcagagagggagtggccaactccatcactaggggttccttgtagttaatgattaacccgccatgctacttatcgcggccgcaggctcagaggcacacaggagtttctgggctcaccctgcccccttccaacccctcagttcccatcctccagcagctgtttgtgtgctgcctctgaagtccacactgaacaaacttcagcctactcatgtccctaaaatgggcaaacattgcaagcagcaaacagcaaacacacagccctccctgcctgctgaccttggagctggggcagaggtcagagacctctctgggcccatgccacctccaacatccactcgaccccttggaatttcggtggagaggagcagaggttgtcctggcgtggtttaggtagtgtgagagggtccgggttcaaaaccacttgctgggtggggagtcgtcagtaagtggctatgccccgaccccgaagcctgtttccccatctgtacaatggaaatgataaagacgcccatctgatagggtttttgtggcaaataaacatttggtttttttgttttgttttgttttgttttttgagatggaggtttgctctgtcgcccaggctggagtgcagtgacacaatctcatctcaccacaaccttcccctgcctcagcctcccaagtagctgggattacaagcatgtgccaccacacctggctaattttctatttttagtagagacgggtttctccatgttggtcagcctcagcctcccaagtaactgggattacaggcctgtgccaccacacccggctaattttttctatttttgacagggacggggtttcaccatgttggtcaggctggtctagaggtactggatcttgctaccagtggaacagccactaaggattctgcagtgagagcagagggccagctaagtggtactctcccagagactgtctgactcacgccaccccctccaccttggacacaggacgctgtggtttctgagccaggtacaatgactcctttcggtaagtgcagtggaagctgtacactgcccaggcaaagcgtccgggcagcgtaggcgggcgactcagatcccagccagtggacttagcccctgtttgctcctccgataactggggtgaccttggttaatattcaccagcagcctcccccgttgcccctctggatccactgcttaaatacggacgaggacagggccctgtctcctcagcttcaggcaccaccactgacctgggacagtgaataattactctaaggtaaatataaaatttttaagtgtataatgtgttaaactactgattctaattgtttctctcttttagattccaacctttggaactgagtttaaacagccaccatgcagattgagctgagcacctgcttcttcctgtgcctgctgaggttctgcttctctgccaccaggagatactacctgggggctgtggagctgagctgggactacatgcagtctgacctgggggagctgcctgtggatgccaggttcccccccagagtgcccaagagcttccccttcaacacctctgtggtgtacaagaagaccctgtttgtggagttcactgaccacctgttcaacattgccaagcccaggcccccctggatgggcctgctgggccccaccatccaggctgaggtgtatgacactgtggtgatcaccctgaagaacatggccagccaccctgtgagcctgcatgctgtgggggtgagctactggaaggcctctgagggggctgagtatgatgaccagaccagccagagggagaaggaggatgacaaggtgttccctgggggcagccacacctatgtgtggcaggtgctgaaggagaatggccccatggcctctgaccccctgtgcctgacctacagctacctgagccatgtggacctggtgaaggacctgaactctggcctgattggggccctgctggtgtgcagggagggcagcctggccaaggagaagacccagaccctgcacaagttcatcctgctgtttgctgtgtttgatgagggcaagagctggcactctgaaaccaagaacagcctgatgcaggacagggatgctgcctctgccagggcctggcccaagatgcacactgtgaatggctatgtgaacaggagcctgcctggcctgattggctgccacaggaagtctgtgtactggcatgtgattggcatgggcaccacccctgaggtgcacagcatcttcctggagggccacaccttcctggtcaggaaccacaggcaggccagcctggagatcagccccatcaccttcctgactgcccagaccctgctgatggacctgggccagttcctgctgagctgccacatcagcagccaccagcatgatggcatggaggcctatgtgaaggtggacagctgccctgaggagccccagctgaggatgaagaacaatgaggaggctgaggactatgatgatgacctgactgactctgagatggatgtggtgaggtttgatgatgacaacagccccagcttcatccagatcaggtctgtggccaagaagcaccccaagacctgggtgcactacattgctgctgaggaggaggactgggactatgcccccctggtgctggcccctgatgacaggagctacaagagccagtacctgaacaatggcccccagaggattggcaggaagtacaagaaggtcaggttcatggcctacactgatgaaaccttcaagaccagggaggccatccagcatgagtctggcatcctgggccccctgctgtatggggaggtgggggacaccctgctgatcatcttcaagaaccaggccagcaggccctacaacatctacccccatggcatcactgatgtgaggcccctgtacagcaggaggctgcccaagggggtgaagcacctgaaggacttccccatcctgcctggggagatcttcaagtacaagtggactgtgactgtggaggatggccccaccaagtctgaccccaggtgcctgaccagatactacagcagctttgtgaacatggagagggacctggcctctggcctgattggccccctgctgatctgctacaaggagtctgtggaccagaggggcaaccagatcatgtctgacaagaggaatgtgatcctgttctctgtgtttgatgagaacaggagctggtacctgactgagaacatccagaggttcctgcccaaccctgctggggtgcagctggaggaccctgagttccaggccagcaacatcatgcacagcatcaatggctatgtgtttgacagcctgcagctgtctgtgtgcctgcatgaggtggcctactggtacatcctgagcattggggcccagactgacttcctgtctgtgttcttctctggctacaccttcaagcacaagatggtgtatgaggacaccctgaccctgttccccttctctggggagactgtgttcatgagcatggagaaccctggcctgtggattctgggctgccacaactctgacttcaggaacaggggcatgactgccctgctgaaagtctccagctgtgacaagaacactggggactactatgaggacagctatgaggacatctctgcctacctgctgagcaagaacaatgccattgagcccaggagcttcagccagaatagcaggcaccccagcaccaggcagaagcagttcaatgccaccaccatcccagagaataccaccctgcagtctgaccaggaggagattgactatgatgacaccatctctgtggagatgaagaaggaggactttgacatctacgacgaggacgagaaccagagccccaggagcttccagaagaagaccaggcactacttcattgctgctgtggagaggctgtgggactatggcatgagcagcagcccccatgtgctgaggaacagggcccagtctggctctgtgccccagttcaagaaggtggtgttccaggagttcactgatggcagcttcacccagcccctgtacagaggggagctgaatgagcacctgggcctgctgggcccctacatcagggctgaggtggaggacaacatcatggtgaccttcaggaaccaggccagcaggccctacagcttctacagcagcctgatcagctatgaggaggaccagaggcagggggctgagcccaggaagaactttgtgaagcccaatgaaaccaagacctacttctggaaggtgcagcaccacatggcccccaccaaggatgagtttgactgcaaggcctgggcctacttctctgatgtggacctggagaaggatgtgcactctggcctgattggccccctgctggtgtgccacaccaacaccctgaaccctgcccatggcaggcaggtgactgtgcaggagtttgccctgttcttcaccatctttgatgaaaccaagagctggtacttcactgagaacatggagaggaactgcagggccccctgcaacatccagatggaggaccccaccttcaaggagaactacaggttccatgccatcaatggctacatcatggacaccctgcctggcctggtgatggcccaggaccagaggatcaggtggtacctgctgagcatgggcagcaatgagaacatccacagcatccacttctctggccatgtgttcactgtgaggaagaaggaggagtacaagatggccctgtacaacctgtaccctggggtgtttgagactgtggagatgctgcccagcaaggctggcatctggagggtggagtgcctgattggggagcacctgcatgctggcatgagcaccctgttcctggtgtacagcaacaagtgccagacccccctgggcatggcctctggccacatcagggacttccagatcactgcctctggccagtatggccagtgggcccccaagctggccaggctgcactactctggcagcatcaatgcctggagcaccaaggagcccttcagctggatcaaggtggacctgctggcccccatgatcatccatggcatcaagacccagggggccaggcagaagttcagcagcctgtacatcagccagttcatcatcatgtacagcctggatggcaagaagtggcagacctacaggggcaacagcactggcaccctgatggtgttctttggcaatgtggacagctctggcatcaagcacaacatcttcaacccccccatcattgccagatacatcaggctgcaccccacccactacagcatcaggagcaccctgaggatggagctgatgggctgtgacctgaacagctgcagcatgcccctgggcatggagagcaaggccatctctgatgcccagatcactgccagcagctacttcaccaacatgtttgccacctggagccccagcaaggccaggctgcacctgcagggcaggagcaatgcctggaggccccaggtcaacaaccccaaggagtggctgcaggtggacttccagaagaccatgaaggtgactggggtgaccacccagggggtgaagagcctgctgaccagcatgtatgtgaaggagttcctgatcagcagcagccaggatggccaccagtggaccctgttcttccagaatggcaaggtgaaggtgttccagggcaaccaggacagcttcacccctgtggtgaacagcctggacccccccctgctgaccagatacctgaggattcacccccagagctgggtgcaccagattgccctgaggatggaggtgctgggctgtgaggcccaggacctgtactgattaattaagctcgctttcttgctgtccaatttctattaaaggttcctttgttccctaagtccaactactaaactgggggatattatgaagggccttgagcatctggattctgcctcagacatgataagatacattgatgagtttggacaaaccacaactagaatgcagtgaaaaaaatgctttatttgtgaaatttgtgatgctattgctttatttgtaaccattataagctgcaataaacaagttaacaacaacaattgcattcattttatgtttcaggttcagggggagatgtgggaggttttttaaagcaagtaaaacctctacaaatgtggtatctagagcatggctacgtagataagtagcatggcgggttaatcattaactacacctgcaggaggaacccctagtgatggagttggccactccctctctgcgcgctcgctcgctcactgaggccgggcgaccaaaggtcgcccgacgcccgggcggcctcagtgagcgagcgagcgcgcagctgcctgcagg

SEQ ID NO: 35 - DNA, 6393 bp, Artificial Sequence
  Description of Artificial Sequence: Synthetic polynucleotide
cctgcaggcagctgcgcgctcgctcgctcactgaggccgcccgggcaaagcccgggcgtcgggcgacctttggtcgcccggcctcagtgagcgagcgagcgcgcagagagggagtggccaactccatcactaggggttccttgtagttaatgattaacccgccatgctacttatcgcggccgcaggctcagaggcacacaggagtttctgggctcaccctgcccccttccaacccctcagttcccatcctccagcagctgtttgtgtgctgcctctgaagtccacactgaacaaacttcagcctactcatgtccctaaaatgggcaaacattgcaagcagcaaacagcaaacacacagccctccctgcctgctgaccttggagctggggcagaggtcagagacctctctgggcccatgccacctccaacatccactcgaccccttggaatttcggtggagaggagcagaggttgtcctggcgtggtttaggtagtgtgagagggtccgggttcaaaaccacttgctgggtggggagtcgtcagtaagtggctatgccccgaccccgaagcctgtttccccatctgtacaatggaaatgataaagacgcccatctgatagggtttttgtggcaaataaacatttggtttttttgttttgttttgttttgttttttgagatggaggtttgctctgtcgcccaggctggagtgcagtgacacaatctcatctcaccacaaccttcccctgcctcagcctcccaagtagctgggattacaagcatgtgccaccacacctggctaattttctatttttagtagagacgggtttctccatgttggtcagcctcagcctcccaagtaactgggattacaggcctgtgccaccacacccggctaattttttctatttttgacagggacggggtttcaccatgttggtcaggctggtctagaggtactggatcttgctaccagtggaacagccactaaggattctgcagtgagagcagagggccagctaagtggtactctcccagagactgtctgactcacgccaccccctccaccttggacacaggacgctgtggtttctgagccaggtacaatgactcctttcggtaagtgcagtggaagctgtacactgcccaggcaaagcgtccgggcagcgtaggcgggcgactcagatcccagccagtggacttagcccctgtttgctcctccgataactggggtgaccttggttaatattcaccagcagcctcccccgttgcccctctggatccactgcttaaatacggacgaggacagggccctgtctcctcagcttcaggcaccaccactgacctgggacagtgaataattactctaaggtaaatataaaatttttaagtgtataatgtgttaaactactgattctaattgtttctctcttttagattccaacctttggaactgagtttaaaccgcagccaccatgcagattgagctgagcacctgcttcttcctgtgcctgctgaggttctgcttctctgccaccaggagatactacctgggggctgtggagctgagctgggactacatgcagtctgacctgggggagctgcctgtggatgccaggttcccccccagagtgcccaagagcttccccttcaacacctctgtggtgtacaagaagaccctgtttgtggagttcactgaccacctgttcaacattgccaagcccaggcccccctggatgggcctgctgggccccaccatccaggctgaggtgtatgacactgtggtgatcaccctgaagaacatggccagccaccctgtgagcctgcatgctgtgggggtgagctactggaaggcctctgagggggctgagtatgatgaccagaccagccagagggagaaggaggatgacaaggtgttccctgggggcagccacacctatgtgtggcaggtgctgaaggagaatggccccatggcctctgaccccctgtgcctgacctacagctacctgagccatgtggacctggtgaaggacctgaactctggcctgattggggccctgctggtgtgcagggagggcagcctggccaaggagaagacccagaccctgcacaagttcatcctgctgtttgctgtgtttgatgagggcaagagctggcactctgaaaccaagaacagcctgatgcaggacagggatgctgcctctgccagggcctggcccaagatgcacactgtgaatggctatgtgaacaggagcctgcctggcctgattggctgccacaggaagtctgtgtactggcatgtgattggcatgggcaccacccctgaggtgcacagcatcttcctggagggccacaccttcctggtcaggaaccacaggcaggccagcctggagatcagccccatcaccttcctgactgcccagaccctgctgatggacctgggccagttcctgctgagctgccacatcagcagccaccagcatgatggcatggaggcctatgtgaaggtggacagctgccctgaggagccccagctgaggatgaagaacaatgaggaggctgaggactatgatgatgacctgactgactctgagatggatgtggtgaggtttgatgatgacaacagccccagcttcatccagatcaggtctgtggccaagaagcaccccaagacctgggtgcactacattgctgctgaggaggaggactgggactatgcccccctggtgctggcccctgatgacaggagctacaagagccagtacctgaacaatggcccccagaggattggcaggaagtacaagaaggtcaggttcatggcctacactgatgaaaccttcaagaccagggaggccatccagcatgagtctggcatcctgggccccctgctgtatggggaggtgggggacaccctgctgatcatcttcaagaaccaggccagcaggccctacaacatctacccccatggcatcactgatgtgaggcccctgtacagcaggaggctgcccaagggggtgaagcacctgaaggacttccccatcctgcctggggagatcttcaagtacaagtggactgtgactgtggaggatggccccaccaagtctgaccccaggtgcctgaccagatactacagcagctttgtgaacatggagagggacctggcctctggcctgattggccccctgctgatctgctacaaggagtctgtggaccagaggggcaaccagatcatgtctgacaagaggaatgtgatcctgttctctgtgtttgatgagaacaggagctggtacctgactgagaacatccagaggttcctgcccaaccctgctggggtgcagctggaggaccctgagttccaggccagcaacatcatgcacagcatcaatggctatgtgtttgacagcctgcagctgtctgtgtgcctgcatgaggtggcctactggtacatcctgagcattggggcccagactgacttcctgtctgtgttcttctctggctacaccttcaagcacaagatggtgtatgaggacaccctgaccctgttccccttctctggggagactgtgttcatgagcatggagaaccctggcctgtggattctgggctgccacaactctgacttcaggaacaggggcatgactgccctgctgaaagtctccagctgtgacaagaacactggggactactatgaggacagctatgaggacatctctgcctacctgctgagcaagaacaatgccattgagcccaggagcttcagccagaatagcaggcaccccagcaccaggcagaagcagttcaatgccaccaccatcccagagaataccaccctgcagtctgaccaggaggagattgactatgatgacaccatctctgtggagatgaagaaggaggactttgacatctacgacgaggacgagaaccagagccccaggagcttccagaagaagaccaggcactacttcattgctgctgtggagaggctgtgggactatggcatgagcagcagcccccatgtgctgaggaacagggcccagtctggctctgtgccccagttcaagaaggtggtgttccaggagttcactgatggcagcttcacccagcccctgtacagaggggagctgaatgagcacctgggcctgctgggcccctacatcagggctgaggtggaggacaacatcatggtgaccttcaggaaccaggccagcaggccctacagcttctacagcagcctgatcagctatgaggaggaccagaggcagggggctgagcccaggaagaactttgtgaagcccaatgaaaccaagacctacttctggaaggtgcagcaccacatggcccccaccaaggatgagtttgactgcaaggcctgggcctacttctctgatgtggacctggagaaggatgtgcactctggcctgattggccccctgctggtgtgccacaccaacaccctgaaccctgcccatggcaggcaggtgactgtgcaggagtttgccctgttcttcaccatctttgatgaaaccaagagctggtacttcactgagaacatggagaggaactgcagggccccctgcaacatccagatggaggaccccaccttcaaggagaactacaggttccatgccatcaatggctacatcatggacaccctgcctggcctggtgatggcccaggaccagaggatcaggtggtacctgctgagcatgggcagcaatgagaacatccacagcatccacttctctggccatgtgttcactgtgaggaagaaggaggagtacaagatggccctgtacaacctgtaccctggggtgtttgagactgtggagatgctgcccagcaaggctggcatctggagggtggagtgcctgattggggagcacctgcatgctggcatgagcaccctgttcctggtgtacagcaacaagtgccagacccccctgggcatggcctctggccacatcagggacttccagatcactgcctctggccagtatggccagtgggcccccaagctggccaggctgcactactctggcagcatcaatgcctggagcaccaaggagcccttcagctggatcaaggtggacctgctggcccccatgatcatccatggcatcaagacccagggggccaggcagaagttcagcagcctgtacatcagccagttcatcatcatgtacagcctggatggcaagaagtggcagacctacaggggcaacagcactggcaccctgatggtgttctttggcaatgtggacagctctggcatcaagcacaacatcttcaacccccccatcattgccagatacatcaggctgcaccccacccactacagcatcaggagcaccctgaggatggagctgatgggctgtgacctgaacagctgcagcatgcccctgggcatggagagcaaggccatctctgatgcccagatcactgccagcagctacttcaccaacatgtttgccacctggagccccagcaaggccaggctgcacctgcagggcaggagcaatgcctggaggccccaggtcaacaaccccaaggagtggctgcaggtggacttccagaagaccatgaaggtgactggggtgaccacccagggggtgaagagcctgctgaccagcatgtatgtgaaggagttcctgatcagcagcagccaggatggccaccagtggaccctgttcttccagaatggcaaggtgaaggtgttccagggcaaccaggacagcttcacccctgtggtgaacagcctggacccccccctgctgaccagatacctgaggattcacccccagagctgggtgcaccagattgccctgaggatggaggtgctgggctgtgaggcccaggacctgtactgattaattaagctcgctttcttgctgtccaatttctattaaaggttcctttgttccctaagtccaactactaaactgggggatattatgaagggccttgagcatctggattctgcctcagacatgataagatacattgatgagtttggacaaaccacaactagaatgcagtgaaaaaaatgctttatttgtgaaatttgtgatgctattgctttatttgtaaccattataagctgcaataaacaagttaacaacaacaattgcattcattttatgtttcaggttcagggggagatgtgggaggttttttaaagcaagtaaaacctctacaaatgtggtatctagagcatggctacgtagataagtagcatggcgggttaatcattaactacacctgcaggaggaacccctagtgatggagttggccactccctctctgcgcgctcgctcgctcactgaggccgggcgaccaaaggtcgcccgacgcccgggcggcctcagtgagcgagcgagcgcgcagctgcctgcagg

SEQ ID NO: 36 - DNA, 6378 bp, Artificial Sequence
  Description of Artificial Sequence: Synthetic polynucleotide
cctgcaggcagctgcgcgctcgctcgctcactgaggccgcccgggcaaagcccgggcgtcgggcgacctttggtcgcccggcctcagtgagcgagcgagcgcgcagagagggagtggccaactccatcactaggggttccttgtagttaatgattaacccgccatgctacttatcgcggccgcaggctcagaggcacacaggagtttctgggctcaccctgcccccttccaacccctcagttcccatcctccagcagctgtttgtgtgctgcctctgaagtccacactgaacaaacttcagcctactcatgtccctaaaatgggcaaacattgcaagcagcaaacagcaaacacacagccctccctgcctgctgaccttggagctggggcagaggtcagagacctctctgggcccatgccacctccaacatccactcgaccccttggaatttcggtggagaggagcagaggttgtcctggcgtggtttaggtagtgtgagagggtccgggttcaaaaccacttgctgggtggggagtcgtcagtaagtggctatgccccgaccccgaagcctgtttccccatctgtacaatggaaatgataaagacgcccatctgatagggtttttgtggcaaataaacatttggtttttttgttttgttttgttttgttttttgagatggaggtttgctctgtcgcccaggctggagtgcagtgacacaatctcatctcaccacaaccttcccctgcctcagcctcccaagtagctgggattacaagcatgtgccaccacacctggctaattttctatttttagtagagacgggtttctccatgttggtcagcctcagcctcccaagtaactgggattacaggcctgtgccaccacacccggctaattttttctatttttgacagggacggggtttcaccatgttggtcaggctggtctagaggtactggatcttgctaccagtggaacagccactaaggattctgcagtgagagcagagggccagctaagtggtactctcccagagactgtctgactcacgccaccccctccaccttggacacaggacgctgtggtttctgagccaggtacaatgactcctttcggtaagtgcagtggaagctgtacactgcccaggcaaagcgtccgggcagcgtaggcgggcgactcagatcccagccagtggacttagcccctgtttgctcctccgataactggggtgaccttggttaatattcaccagcagcctcccccgttgcccctctggatccactgcttaaatacggacgaggacagggccctgtctcctcagcttcaggcaccaccactgacctgggacagtgaataattactctaaggtaaatataaaatttttaagtgtataatgtgttaaactactgattctaattgtttctctcttttagattccaacctttggaactgaaccatgcagattgagctgagcacctgcttcttcctgtgcctgctgaggttctgcttctctgccaccaggagatactacctgggggctgtggagctgagctgggactacatgcagtctgacctgggggagctgcctgtggatgccaggttcccccccagagtgcccaagagcttccccttcaacacctctgtggtgtacaagaagaccctgtttgtggagttcactgaccacctgttcaacattgccaagcccaggcccccctggatgggcctgctgggccccaccatccaggctgaggtgtatgacactgtggtgatcaccctgaagaacatggccagccaccctgtgagcctgcatgctgtgggggtgagctactggaaggcctctgagggggctgagtatgatgaccagaccagccagagggagaaggaggatgacaaggtgttccctgggggcagccacacctatgtgtggcaggtgctgaaggagaatggccccatggcctctgaccccctgtgcctgacctacagctacctgagccatgtggacctggtgaaggacctgaactctggcctgattggggccctgctggtgtgcagggagggcagcctggccaaggagaagacccagaccctgcacaagttcatcctgctgtttgctgtgtttgatgagggcaagagctggcactctgaaaccaagaacagcctgatgcaggacagggatgctgcctctgccagggcctggcccaagatgcacactgtgaatggctatgtgaacaggagcctgcctggcctgattggctgccacaggaagtctgtgtactggcatgtgattggcatgggcaccacccctgaggtgcacagcatcttcctggagggccacaccttcctggtcaggaaccacaggcaggccagcctggagatcagccccatcaccttcctgactgcccagaccctgctgatggacctgggccagttcctgctgagctgccacatcagcagccaccagcatgatggcatggaggcctatgtgaaggtggacagctgccctgaggagccccagctgaggatgaagaacaatgaggaggctgaggactatgatgatgacctgactgactctgagatggatgtggtgaggtttgatgatgacaacagccccagcttcatccagatcaggtctgtggccaagaagcaccccaagacctgggtgcactacattgctgctgaggaggaggactgggactatgcccccctggtgctggcccctgatgacaggagctacaagagccagtacctgaacaatggcccccagaggattggcaggaagtacaagaaggtcaggttcatggcctacactgatgaaaccttcaagaccagggaggccatccagcatgagtctggcatcctgggccccctgctgtatggggaggtgggggacaccctgctgatcatcttcaagaaccaggccagcaggccctacaacatctacccccatggcatcactgatgtgaggcccctgtacagcaggaggctgcccaagggggtgaagcacctgaaggacttccccatcctgcctggggagatcttcaagtacaagtggactgtgactgtggaggatggccccaccaagtctgaccccaggtgcctgaccagatactacagcagctttgtgaacatggagagggacctggcctctggcctgattggccccctgctgatctgctacaaggagtctgtggaccagaggggcaaccagatcatgtctgacaagaggaatgtgatcctgttctctgtgtttgatgagaacaggagctggtacctgactgagaacatccagaggttcctgcccaaccctgctggggtgcagctggaggaccctgagttccaggccagcaacatcatgcacagcatcaatggctatgtgtttgacagcctgcagctgtctgtgtgcctgcatgaggtggcctactggtacatcctgagcattggggcccagactgacttcctgtctgtgttcttctctggctacaccttcaagcacaagatggtgtatgaggacaccctgaccctgttccccttctctggggagactgtgttcatgagcatggagaaccctggcctgtggattctgggctgccacaactctgacttcaggaacaggggcatgactgccctgctgaaagtctccagctgtgacaagaacactggggactactatgaggacagctatgaggacatctctgcctacctgctgagcaagaacaatgccattgagcccaggagcttcagccagaatagcaggcaccccagcaccaggcagaagcagttcaatgccaccaccatcccagagaataccaccctgcagtctgaccaggaggagattgactatgatgacaccatctctgtggagatgaagaaggaggactttgacatctacgacgaggacgagaaccagagccccaggagcttccagaagaagaccaggcactacttcattgctgctgtggagaggctgtgggactatggcatgagcagcagcccccatgtgctgaggaacagggcccagtctggctctgtgccccagttcaagaaggtggtgttccaggagttcactgatggcagcttcacccagcccctgtacagaggggagctgaatgagcacctgggcctgctgggcccctacatcagggctgaggtggaggacaacatcatggtgaccttcaggaaccaggccagcaggccctacagcttctacagcagcctgatcagctatgaggaggaccagaggcagggggctgagcccaggaagaactttgtgaagcccaatgaaaccaagacctacttctggaaggtgcagcaccacatggcccccaccaaggatgagtttgactgcaaggcctgggcctacttctctgatgtggacctggagaaggatgtgcactctggcctgattggccccctgctggtgtgccacaccaacaccctgaaccctgcccatggcaggcaggtgactgtgcaggagtttgccctgttcttcaccatctttgatgaaaccaagagctggtacttcactgagaacatggagaggaactgcagggccccctgcaacatccagatggaggaccccaccttcaaggagaactacaggttccatgccatcaatggctacatcatggacaccctgcctggcctggtgatggcccaggaccagaggatcaggtggtacctgctgagcatgggcagcaatgagaacatccacagcatccacttctctggccatgtgttcactgtgaggaagaaggaggagtacaagatggccctgtacaacctgtaccctggggtgtttgagactgtggagatgctgcccagcaaggctggcatctggagggtggagtgcctgattggggagcacctgcatgctggcatgagcaccctgttcctggtgtacagcaacaagtgccagacccccctgggcatggcctctggccacatcagggacttccagatcactgcctctggccagtatggccagtgggcccccaagctggccaggctgcactactctggcagcatcaatgcctggagcaccaaggagcccttcagctggatcaaggtggacctgctggcccccatgatcatccatggcatcaagacccagggggccaggcagaagttcagcagcctgtacatcagccagttcatcatcatgtacagcctggatggcaagaagtggcagacctacaggggcaacagcactggcaccctgatggtgttctttggcaatgtggacagctctggcatcaagcacaacatcttcaacccccccatcattgccagatacatcaggctgcaccccacccactacagcatcaggagcaccctgaggatggagctgatgggctgtgacctgaacagctgcagcatgcccctgggcatggagagcaaggccatctctgatgcccagatcactgccagcagctacttcaccaacatgtttgccacctggagccccagcaaggccaggctgcacctgcagggcaggagcaatgcctggaggccccaggtcaacaaccccaaggagtggctgcaggtggacttccagaagaccatgaaggtgactggggtgaccacccagggggtgaagagcctgctgaccagcatgtatgtgaaggagttcctgatcagcagcagccaggatggccaccagtggaccctgttcttccagaatggcaaggtgaaggtgttccagggcaaccaggacagcttcacccctgtggtgaacagcctggacccccccctgctgaccagatacctgaggattcacccccagagctgggtgcaccagattgccctgaggatggaggtgctgggctgtgaggcccaggacctgtactgattaattaagctcgctttcttgctgtccaatttctattaaaggttcctttgttccctaagtccaactactaaactgggggatattatgaagggccttgagcatctggattctgcctcagacatgataagatacattgatgagtttggacaaaccacaactagaatgcagtgaaaaaaatgctttatttgtgaaatttgtgatgctattgctttatttgtaaccattataagctgcaataaacaagttaacaacaacaattgcattcattttatgtttcaggttcagggggagatgtgggaggttttttaaagcaagtaaaacctctacaaatgtggtatctagagcatggctacgtagataagtagcatggcgggttaatcattaactacacctgcaggaggaacccctagtgatggagttggccactccctctctgcgcgctcgctcgctcactgaggccgggcgaccaaaggtcgcccgacgcccgggcggcctcagtgagcgagcgagcgcgcagctgcctgcagg

SEQ ID NO: 37 - DNA, 6283 bp, Artificial Sequence
  Description of Artificial Sequence: Synthetic polynucleotide
cctgcaggcagctgcgcgctcgctcgctcactgaggccgcccgggcaaagcccgggcgtcgggcgacctttggtcgcccggcctcagtgagcgagcgagcgcgcagagagggagtggccaactccatcactaggggttccttgtagttaatgattaacccgccatgctacttatcgcggccgcaggctcagaggcacacaggagtttctgggctcaccctgcccccttccaacccctcagttcccatcctccagcagctgtttgtgtgctgcctctgaagtccacactgaacaaacttcagcctactcatgtccctaaaatgggcaaacattgcaagcagcaaacagcaaacacacagccctccctgcctgctgaccttggagctggggcagaggtcagagacctctctgggcccatgccacctccaacatccactcgaccccttggaatttcggtggagaggagcagaggttgtcctggcgtggtttaggtagtgtgagagggtccgggttcaaaaccacttgctgggtggggagtcgtcagtaagtggctatgccccgaccccgaagcctgtttccccatctgtacaatggaaatgataaagacgcccatctgatagggtttttgtggcaaataaacatttggtttttttgttttgttttgttttgttttttgagatggaggtttgctctgtcgcccaggctggagtgcagtgacacaatctcatctcaccacaaccttcccctgcctcagcctcccaagtagctgggattacaagcatgtgccaccacacctggctaattttctatttttagtagagacgggtttctccatgttggtcagcctcagcctcccaagtaactgggattacaggcctgtgccaccacacccggctaattttttctatttttgacagggacggggtttcaccatgttggtcaggctggtctagaggtactggatcttgctaccagtggaacagccactaaggattctgcagtgagagcagagggccagctaagtggtactctcccagagactgtctgactcacgccaccccctccaccttggacacaggacgctgtggtttctgagccaggtacaatgactcctttcggtaagtgcagtggaagctgtacactgcccaggcaaagcgtccgggcagcgtaggcgggcgactcagatcccagccagtggacttagcccctgtttgctcctccgataactggggtgaccttggttaatattcaccagcagcctcccccgttgcccctctggatccactgcttaaatacggacgaggacagggccctgtctcctcagcttcaggcaccaccactgacctgggacagtgaataattactctaaggtaaatataaaatttttaagtgtataatgtgttaaactactgattctaattgtttctctcttttagattccaacctttggaactgagtttaaacagccaccatgcaaattgagttatccacctgtttcttcctctgtctcctgaggttctgcttctctgccaccaggagatactacctgggggctgtggagctgtcctgggactacatgcagtcagacctgggggagctgccagttgatgccaggttcccccccagagtccccaagtccttccccttcaacacctcagtggtgtacaaaaagaccctgtttgtggagttcacagaccacctgttcaacatagccaagcccaggcccccctggatgggcctgctgggccccaccatccaggcagaggtttatgacacagtggtcatcaccctgaagaacatggcctcccaccctgtgtccctccatgctgtgggggtgagctactggaaggccagtgagggggcagaatatgatgaccagaccagccagagggagaaggaggatgacaaggtgttcccagggggcagccacacctatgtgtggcaggtcctgaaggagaatggccccatggcctctgaccccctctgcctcacctactcctacctgtcccatgtggacctggtgaaggacctcaactctggcctgattggagccctcctggtgtgcagggaggggagcctggccaaggaaaagacccagaccctgcacaagtttatcctgctctttgcagtctttgatgaggggaagtcctggcacagtgagaccaagaactccctgatgcaggacagagatgctgcctcagccagggcctggcccaagatgcacacagtgaatgggtatgtcaacaggagcctgccaggcctgattgggtgccacagaaagtcagtgtactggcatgtcattggcatgggcaccaccccagaggtgcactccatcttcctggagggccacaccttcctggtgaggaaccacagacaggccagcctggagatcagcccaatcaccttcctcacagcccagaccctcctcatggacctgggccagtttctcctgagctgccacatctcctcccaccagcatgatggcatggaggcctatgtgaaggtggacagctgccctgaggagccccagctcaggatgaagaacaatgaggaggcagaggactatgatgatgatctgacagactctgagatggatgtggtgagatttgatgatgacaacagcccctccttcatccagatcaggtctgtggccaagaagcaccctaagacctgggtgcactacattgcagctgaggaggaggactgggactatgcccccctggtcctggcccctgatgataggtcctacaagtcccagtacctgaacaatggcccccagaggatagggagaaagtacaagaaggtgaggttcatggcctacactgatgagaccttcaagactagggaagccatccagcatgagtctgggatcctgggccccctcctctatggggaggtgggggacaccctgctgatcatcttcaagaaccaggccagcaggccctacaacatttacccccatgggatcacagatgtgagacccctgtacagcaggagactgccaaagggggtgaagcacctgaaggacttccccatcctgccaggggagatcttcaagtacaagtggactgtgacagtggaggatgggcccaccaaatctgaccctagatgcctgaccagatactacagcagctttgtgaacatggagagggacctggcctctggactgattggccctctgctgatctgctacaaggagagtgtggaccagaggggaaaccagatcatgtctgacaagaggaatgtgatcctgttctcagtgtttgatgagaacagatcctggtacctcactgagaacatccagaggttcctgcccaacccagcaggggtgcagctggaggacccagagttccaggcctccaacatcatgcactccatcaatggctatgtctttgactccctgcagctgtcagtgtgcctgcatgaggtggcctactggtacatcctctccattggagcccagactgacttcctgtcagtcttcttcagtggctacaccttcaagcacaagatggtctatgaggacactctgaccctgttccccttctctggggagactgtgttcatgtccatggagaaccctggactgtggatcctgggctgccacaacagtgacttcaggaacaggggcatgactgccctgctgaaggtctccagctgtgacaagaacactggggactactatgaggactcctatgaggacatctctgcctacctgctgtccaagaacaatgccattgagcccaggtccttctcccagaacagcagacacccctccaccaggcagaagcagttcaatgcaaccaccatccctgaaaataccaccctgcagagtgaccaggaggagattgactatgatgacaccatctctgtggagatgaagaaggaggactttgacatctatgatgaggatgagaaccagagccctagaagcttccagaagaagaccagacactacttcattgctgcagtggaaagactgtgggactatgggatgagctcctccccccatgtgctgaggaacagggcccagtctggctctgtgccccagttcaagaaggtggtgttccaggagttcactgatggctccttcacccagcccctgtacaggggagagctgaatgagcacctgggcctgctgggcccctacatcagggctgaggtggaggacaatatcatggtgaccttcagaaaccaggcctccagaccttactccttctacagcagcctgatctcctatgaggaggaccagagacagggggctgagcccaggaagaactttgtgaagcccaatgagaccaagacctacttctggaaggtgcagcaccacatggcccccaccaaggatgagtttgactgcaaggcctgggcctacttctctgatgtggacctggagaaggatgtgcactctggcctgattggccccctgctggtgtgccacaccaacaccctgaaccctgcccatggcaggcaggtgactgtgcaggagtttgccctgttcttcaccatctttgatgagaccaagagctggtacttcactgagaacatggagaggaactgcagggccccctgcaacatccagatggaggaccccaccttcaaggagaactacaggttccatgccatcaatggctacatcatggacaccctgcctggcctggtgatggcccaggaccagaggatcaggtggtacctgctgagcatggggagcaatgagaacatccacagcatccacttctctggccatgtgttcacagtgaggaagaaggaggagtacaagatggccctgtacaacctgtaccctggggtgtttgagacagtggagatgctgccctccaaggctggaatctggagggtggagtgcctgattggggagcacctgcatgctggcatgagcaccctgttcctggtgtacagcaacaagtgccagacccccctgggcatggcctctggccacatcagagacttccagatcacagcctcaggccagtatggccagtgggcccccaagctggccaggctgcactactctggcagcatcaatgcctggtccaccaaggagcccttcagctggatcaaggtggacctcctggcccccatgatcatccatggcatcaagacccagggggccaggcagaagttcagctccctgtacatctcccagttcatcatcatgtactccctggatggcaagaagtggcagacctacagaggcaacagcacaggcaccctgatggtgttctttggcaatgtggacagctctgggatcaagcacaacatcttcaacccccccatcattgccaggtacatcagactgcaccccacccactactccatcaggtccaccctgagaatggagctgatgggctgtgacctgaacagctgcagcatgcccctgggcatggagagcaaggccatctctgatgcccagatcacagccagcagctacttcaccaacatgtttgccacctggtcccccagcaaggccaggctgcacctgcagggcaggagcaatgcctggaggccccaggtgaacaaccccaaggagtggctgcaggtggacttccagaagaccatgaaggtgacaggggtgaccacccagggggtgaagtccctgctgaccagcatgtatgtgaaggagttcctgatcagcagctcccaggatggccaccagtggaccctgttcttccagaatggcaaggtgaaggtgttccagggcaaccaggacagcttcacccctgtggtgaactccctggacccccccctgctgaccagatacctgaggatccacccccagtcctgggtgcaccagattgccctgagaatggaggtgctgggctgtgaggcccaggacctgtactgattaattaacagacatgataagatacattgatgagtttggacaaaccacaactagaatgcagtgaaaaaaatgctttatttgtgaaatttgtgatgctattgctttatttgtaaccattataagctgcaataaacaagttaacaacaacaattgcattcattttatgtttcaggttcagggggagatgtgggaggttttttaaagcaagtaaaacctctacaaatgtggtatctagagcatggctacgtagataagtagcatggcgggttaatcattaactacacctgcaggaggaacccctagtgatggagttggccactccctctctgcgcgctcgctcgctcactgaggccgggcgaccaaaggtcgcccgacgcccgggcggcctcagtgagcgagcgagcgcgcagctgcctgcagg

SEQ ID NO: 38 - DNA, 6456 bp, Artificial Sequence
  Description of Artificial Sequence: Synthetic polynucleotide
cctgcaggcagctgcgcgctcgctcgctcactgaggccgcccgggcaaagcccgggcgtcgggcgacctttggtcgcccggcctcagtgagcgagcgagcgcgcagagagggagtggccaactccatcactaggggttccttgtagttaatgattaacccgccatgctacttatcgcggccgcaggctcagaggcacacaggagtttctgggctcaccctgcccccttccaacccctcagttcccatcctccagcagctgtttgtgtgctgcctctgaagtccacactgaacaaacttcagcctactcatgtccctaaaatgggcaaacattgcaagcagcaaacagcaaacacacagccctccctgcctgctgaccttggagctggggcagaggtcagagacctctctgggcccatgccacctccaacatccactcgaccccttggaatttcggtggagaggagcagaggttgtcctggcgtggtttaggtagtgtgagagggtccgggttcaaaaccacttgctgggtggggagtcgtcagtaagtggctatgccccgaccccgaagcctgtttccccatctgtacaatggaaatgataaagacgcccatctgatagggtttttgtggcaaataaacatttggtttttttgttttgttttgttttgttttttgagatggaggtttgctctgtcgcccaggctggagtgcagtgacacaatctcatctcaccacaaccttcccctgcctcagcctcccaagtagctgggattacaagcatgtgccaccacacctggctaattttctatttttagtagagacgggtttctccatgttggtcagcctcagcctcccaagtaactgggattacaggcctgtgccaccacacccggctaattttttctatttttgacagggacggggtttcaccatgttggtcaggctggtctagaggtactggatcttgctaccagtggaacagccactaaggattctgcagtgagagcagagggccagctaagtggtactctcccagagactgtctgactcacgccaccccctccaccttggacacaggacgctgtggtttctgagccaggtacaatgactcctttcggtaagtgcagtggaagctgtacactgcccaggcaaagcgtccgggcagcgtaggcgggcgactcagatcccagccagtggacttagcccctgtttgctcctccgataactggggtgaccttggttaatattcaccagcagcctcccccgttgcccctctggatccactgcttaaatacggacgaggacagggccctgtctcctcagcttcaggcaccaccactgacctgggacagtgaataattactctaaggtaaatataaaatttttaagtgtataatgtgttaaactactgattctaattgtttctctcttttagattccaacctttggaactgagtttaaacagccaccatgcaaattgagttatccacctgtttcttcctctgtctcctgaggttctgcttctctgccaccaggagatactacctgggggctgtggagctgtcctgggactacatgcagtcagacctgggggagctgccagttgatgccaggttcccccccagagtccccaagtccttccccttcaacacctcagtggtgtacaaaaagaccctgtttgtggagttcacagaccacctgttcaacatagccaagcccaggcccccctggatgggcctgctgggccccaccatccaggcagaggtttatgacacagtggtcatcaccctgaagaacatggcctcccaccctgtgtccctccatgctgtgggggtgagctactggaaggccagtgagggggcagaatatgatgaccagaccagccagagggagaaggaggatgacaaggtgttcccagggggcagccacacctatgtgtggcaggtcctgaaggagaatggccccatggcctctgaccccctctgcctcacctactcctacctgtcccatgtggacctggtgaaggacctcaactctggcctgattggagccctcctggtgtgcagggaggggagcctggccaaggaaaagacccagaccctgcacaagtttatcctgctctttgcagtctttgatgaggggaagtcctggcacagtgagaccaagaactccctgatgcaggacagagatgctgcctcagccagggcctggcccaagatgcacacagtgaatgggtatgtcaacaggagcctgccaggcctgattgggtgccacagaaagtcagtgtactggcatgtcattggcatgggcaccaccccagaggtgcactccatcttcctggagggccacaccttcctggtgaggaaccacagacaggccagcctggagatcagcccaatcaccttcctcacagcccagaccctcctcatggacctgggccagtttctcctgagctgccacatctcctcccaccagcatgatggcatggaggcctatgtgaaggtggacagctgccctgaggagccccagctcaggatgaagaacaatgaggaggcagaggactatgatgatgatctgacagactctgagatggatgtggtgagatttgatgatgacaacagcccctccttcatccagatcaggtctgtggccaagaagcaccctaagacctgggtgcactacattgcagctgaggaggaggactgggactatgcccccctggtcctggcccctgatgataggtcctacaagtcccagtacctgaacaatggcccccagaggatagggagaaagtacaagaaggtgaggttcatggcctacactgatgagaccttcaagactagggaagccatccagcatgagtctgggatcctgggccccctcctctatggggaggtgggggacaccctgctgatcatcttcaagaaccaggccagcaggccctacaacatttacccccatgggatcacagatgtgagacccctgtacagcaggagactgccaaagggggtgaagcacctgaaggacttccccatcctgccaggggagatcttcaagtacaagtggactgtgacagtggaggatgggcccaccaaatctgaccctagatgcctgaccagatactacagcagctttgtgaacatggagagggacctggcctctggactgattggccctctgctgatctgctacaaggagagtgtggaccagaggggaaaccagatcatgtctgacaagaggaatgtgatcctgttctcagtgtttgatgagaacagatcctggtacctcactgagaacatccagaggttcctgcccaacccagcaggggtgcagctggaggacccagagttccaggcctccaacatcatgcactccatcaatggctatgtctttgactccctgcagctgtcagtgtgcctgcatgaggtggcctactggtacatcctctccattggagcccagactgacttcctgtcagtcttcttcagtggctacaccttcaagcacaagatggtctatgaggacactctgaccctgttccccttctctggggagactgtgttcatgtccatggagaaccctggactgtggatcctgggctgccacaacagtgacttcaggaacaggggcatgactgccctgctgaaggtctccagctgtgacaagaacactggggactactatgaggactcctatgaggacatctctgcctacctgctgtccaagaacaatgccattgagcccaggtccttctcccagaacagcagacacccctccaccaggcagaagcagttcaatgcaaccaccatccctgaaaataccaccctgcagagtgaccaggaggagattgactatgatgacaccatctctgtggagatgaagaaggaggactttgacatctatgatgaggatgagaaccagagccctagaagcttccagaagaagaccagacactacttcattgctgcagtggaaagactgtgggactatgggatgagctcctccccccatgtgctgaggaacagggcccagtctggctctgtgccccagttcaagaaggtggtgttccaggagttcactgatggctccttcacccagcccctgtacaggggagagctgaatgagcacctgggcctgctgggcccctacatcagggctgaggtggaggacaatatcatggtgaccttcagaaaccaggcctccagaccttactccttctacagcagcctgatctcctatgaggaggaccagagacagggggctgagcccaggaagaactttgtgaagcccaatgagaccaagacctacttctggaaggtgcagcaccacatggcccccaccaaggatgagtttgactgcaaggcctgggcctacttctctgatgtggacctggagaaggatgtgcactctggcctgattggccccctgctggtgtgccacaccaacaccctgaaccctgcccatggcaggcaggtgactgtgcaggagtttgccctgttcttcaccatctttgatgagaccaagagctggtacttcactgagaacatggagaggaactgcagggccccctgcaacatccagatggaggaccccaccttcaaggagaactacaggttccatgccatcaatggctacatcatggacaccctgcctggcctggtgatggcccaggaccagaggatcaggtggtacctgctgagcatggggagcaatgagaacatccacagcatccacttctctggccatgtgttcacagtgaggaagaaggaggagtacaagatggccctgtacaacctgtaccctggggtgtttgagacagtggagatgctgccctccaaggctggaatctggagggtggagtgcctgattggggagcacctgcatgctggcatgagcaccctgttcctggtgtacagcaacaagtgccagacccccctgggcatggcctctggccacatcagagacttccagatcacagcctcaggccagtatggccagtgggcccccaagctggccaggctgcactactctggcagcatcaatgcctggtccaccaaggagcccttcagctggatcaaggtggacctcctggcccccatgatcatccatggcatcaagacccagggggccaggcagaagttcagctccctgtacatctcccagttcatcatcatgtactccctggatggcaagaagtggcagacctacagaggcaacagcacaggcaccctgatggtgttctttggcaatgtggacagctctgggatcaagcacaacatcttcaacccccccatcattgccaggtacatcagactgcaccccacccactactccatcaggtccaccctgagaatggagctgatgggctgtgacctgaacagctgcagcatgcccctgggcatggagagcaaggccatctctgatgcccagatcacagccagcagctacttcaccaacatgtttgccacctggtcccccagcaaggccaggctgcacctgcagggcaggagcaatgcctggaggccccaggtgaacaaccccaaggagtggctgcaggtggacttccagaagaccatgaaggtgacaggggtgaccacccagggggtgaagtccctgctgaccagcatgtatgtgaaggagttcctgatcagcagctcccaggatggccaccagtggaccctgttcttccagaatggcaaggtgaaggtgttccagggcaaccaggacagcttcacccctgtggtgaactccctggacccccccctgctgaccagatacctgaggatccacccccagtcctgggtgcaccagattgccctgagaatggaggtgctgggctgtgaggcccaggacctgtactgattaattaagctcgctttcttgctgtccaatttctattaaaggttcctttgttccctaagtccaactactaaactgggggatattatgaagggccttgagcatctggattctgcctaataaaaaacatttattttcattgcaatgatgtatttaaattatttctgaatattttactaaaaagggaatgtgggaggtcagtgcatttaaaacataaagaaatgaagagctagttcaaaccttgggaaaatacactatatcttaaactccatgaaagaaggtgaggctgcaaacagctaatgcacattggcaacagcccctgatgcctatgccttattcatccctcagaaaaggattcaagtagaggcttgatttggaggttaaagttttgctatgctgtattttatctagagcatggctacgtagataagtagcatggcgggttaatcattaactacacctgcaggaggaacccctagtgatggagttggccactccctctctgcgcgctcgctcgctcactgaggccgggcgaccaaaggtcgcccgacgcccgggcggcctcagtgagcgagcgagcgcgcagctgcctgcagg

SEQ ID NO: 39 - DNA, 6871 bp, Artificial Sequence
  Description of Artificial Sequence: Synthetic polynucleotide
cctgcaggcagctgcgcgctcgctcgctcactgaggccgcccgggcaaagcccgggcgtcgggcgacctttggtcgcccggcctcagtgagcgagcgagcgcgcagagagggagtggccaactccatcactaggggttccttgtagttaatgattaacccgccatgctacttatcgcggccgcgggggaggctgctggtgaatattaaccaaggtcaccccagttatcggaggagcaaacaggggctaagtccaccgggggaggctgctggtgaatattaaccaaggtcaccccagttatcggaggagcaaacaggggctaagtccaccgggggaggctgctggtgaatattaaccaaggtcaccccagttatcggaggagcaaacaggggctaagtccacggtacccactgggaggatgttgagtaagatggaaaactactgatgacccttgcagagacagagtattaggacatgtttgaacaggggccgggcgatcagcaggtagctctagaggatccccgtctgtctgcacatttcgtagagcgagtgttccgatactctaatctccctaggcaaggttcatatttgtgtaggttacttattctccttttgttgactaagtcaataatcagaatcagcaggtttggagtcagcttggcagggatcagcagcctgggttggaaggagggggtataaaagccccttcaccaggagaagccgtcacacagatccacaagctcctgaagaggtaagggtttaagggatggttggttggtggggtattaatgtttaattacctggagcacctgcctgaaatcactttttttcaggttggtttaaacgccgccaccatgcagattgagctgagcacctgcttcttcctgtgcctgctgaggttctgcttctctgccaccaggagatactacctgggggctgtggagctgagctgggactacatgcagtctgacctgggggagctgcctgtggatgccaggttcccccccagagtgcccaagagcttccccttcaacacctctgtggtgtacaagaagaccctgtttgtggagttcactgaccacctgttcaacattgccaagcccaggcccccctggatgggcctgctgggccccaccatccaggctgaggtgtatgacactgtggtgatcaccctgaagaacatggccagccaccctgtgagcctgcatgctgtgggggtgagctactggaaggcctctgagggggctgagtatgatgaccagaccagccagagggagaaggaggatgacaaggtgttccctgggggcagccacacctatgtgtggcaggtgctgaaggagaatggccccatggcctctgaccccctgtgcctgacctacagctacctgagccatgtggacctggtgaaggacctgaactctggcctgattggggccctgctggtgtgcagggagggcagcctggccaaggagaagacccagaccctgcacaagttcatcctgctgtttgctgtgtttgatgagggcaagagctggcactctgaaaccaagaacagcctgatgcaggacagggatgctgcctctgccagggcctggcccaagatgcacactgtgaatggctatgtgaacaggagcctgcctggcctgattggctgccacaggaagtctgtgtactggcatgtgattggcatgggcaccacccctgaggtgcacagcatcttcctggagggccacaccttcctggtcaggaaccacaggcaggccagcctggagatcagccccatcaccttcctgactgcccagaccctgctgatggacctgggccagttcctgctgagctgccacatcagcagccaccagcatgatggcatggaggcctatgtgaaggtggacagctgccctgaggagccccagctgaggatgaagaacaatgaggaggctgaggactatgatgatgacctgactgactctgagatggatgtggtgaggtttgatgatgacaacagccccagcttcatccagatcaggtctgtggccaagaagcaccccaagacctgggtgcactacattgctgctgaggaggaggactgggactatgcccccctggtgctggcccctgatgacaggagctacaagagccagtacctgaacaatggcccccagaggattggcaggaagtacaagaaggtcaggttcatggcctacactgatgaaaccttcaagaccagggaggccatccagcatgagtctggcatcctgggccccctgctgtatggggaggtgggggacaccctgctgatcatcttcaagaaccaggccagcaggccctacaacatctacccccatggcatcactgatgtgaggcccctgtacagcaggaggctgcccaagggggtgaagcacctgaaggacttccccatcctgcctggggagatcttcaagtacaagtggactgtgactgtggaggatggccccaccaagtctgaccccaggtgcctgaccagatactacagcagctttgtgaacatggagagggacctggcctctggcctgattggccccctgctgatctgctacaaggagtctgtggaccagaggggcaaccagatcatgtctgacaagaggaatgtgatcctgttctctgtgtttgatgagaacaggagctggtacctgactgagaacatccagaggttcctgcccaaccctgctggggtgcagctggaggaccctgagttccaggccagcaacatcatgcacagcatcaatggctatgtgtttgacagcctgcagctgtctgtgtgcctgcatgaggtggcctactggtacatcctgagcattggggcccagactgacttcctgtctgtgttcttctctggctacaccttcaagcacaagatggtgtatgaggacaccctgaccctgttccccttctctggggagactgtgttcatgagcatggagaaccctggcctgtggattctgggctgccacaactctgacttcaggaacaggggcatgactgccctgctgaaagtctccagctgtgacaagaacactggggactactatgaggacagctatgaggacatctctgcctacctgctgagcaagaacaatgccattgagcccaggagcttcagccagaatagcaggcaccccagcaccaggcagaagcagttcaatgccaccaccatcccagagaatgatattgagaagactgacccttggtttgcccacaggacccccatgccaaagattcagaatgtgtcctcatctgacttgctgatgctgctgaggcagagccccacaccccatgggctgagcctgtctgacctgcaggaggccaaatatgaaaccttttcagatgaccccagcccaggagccattgacagtaacaacagcctgtctgagatgacccacttcaggccccagctccatcactctggggacatggtgttcaccccagagtcaggcctgcagctgaggctgaatgagaagctgggcaccacagcagccactgagctgaagaagctggactttaaggtgtccagcacctccaacaacctgatcagcaccatcccctctgacaacctggcagctggcactgataacacctccagcctgggcccaccttctatgcctgtgcactatgacagccaactggacaccaccctgtttgggaagaagtcctctccactgacagagtctggagggcccctgtccctgtctgaggagaacaatgactccaagctgctggagtctgggctgatgaacagtcaggagagctcctggggaaagaatgtgtccagcagggagatcaccaggaccaccctgcagtctgaccaggaggagattgactatgatgacaccatctctgtggagatgaagaaggaggactttgacatctacgacgaggacgagaaccagagccccaggagcttccagaagaagaccaggcactacttcattgctgctgtggagaggctgtgggactatggcatgagcagcagcccccatgtgctgaggaacagggcccagtctggctctgtgccccagttcaagaaggtggtgttccaggagttcactgatggcagcttcacccagcccctgtacagaggggagctgaatgagcacctgggcctgctgggcccctacatcagggctgaggtggaggacaacatcatggtgaccttcaggaaccaggccagcaggccctacagcttctacagcagcctgatcagctatgaggaggaccagaggcagggggctgagcccaggaagaactttgtgaagcccaatgaaaccaagacctacttctggaaggtgcagcaccacatggcccccaccaaggatgagtttgactgcaaggcctgggcctacttctctgatgtggacctggagaaggatgtgcactctggcctgattggccccctgctggtgtgccacaccaacaccctgaaccctgcccatggcaggcaggtgactgtgcaggagtttgccctgttcttcaccatctttgatgaaaccaagagctggtacttcactgagaacatggagaggaactgcagggccccctgcaacatccagatggaggaccccaccttcaaggagaactacaggttccatgccatcaatggctacatcatggacaccctgcctggcctggtgatggcccaggaccagaggatcaggtggtacctgctgagcatgggcagcaatgagaacatccacagcatccacttctctggccatgtgttcactgtgaggaagaaggaggagtacaagatggccctgtacaacctgtaccctggggtgtttgagactgtggagatgctgcccagcaaggctggcatctggagggtggagtgcctgattggggagcacctgcatgctggcatgagcaccctgttcctggtgtacagcaacaagtgccagacccccctgggcatggcctctggccacatcagggacttccagatcactgcctctggccagtatggccagtgggcccccaagctggccaggctgcactactctggcagcatcaatgcctggagcaccaaggagcccttcagctggatcaaggtggacctgctggcccccatgatcatccatggcatcaagacccagggggccaggcagaagttcagcagcctgtacatcagccagttcatcatcatgtacagcctggatggcaagaagtggcagacctacaggggcaacagcactggcaccctgatggtgttctttggcaatgtggacagctctggcatcaagcacaacatcttcaacccccccatcattgccagatacatcaggctgcaccccacccactacagcatcaggagcaccctgaggatggagctgatgggctgtgacctgaacagctgcagcatgcccctgggcatggagagcaaggccatctctgatgcccagatcactgccagcagctacttcaccaacatgtttgccacctggagccccagcaaggccaggctgcacctgcagggcaggagcaatgcctggaggccccaggtcaacaaccccaaggagtggctgcaggtggacttccagaagaccatgaaggtgactggggtgaccacccagggggtgaagagcctgctgaccagcatgtatgtgaaggagttcctgatcagcagcagccaggatggccaccagtggaccctgttcttccagaatggcaaggtgaaggtgttccagggcaaccaggacagcttcacccctgtggtgaacagcctggacccccccctgctgaccagatacctgaggattcacccccagagctgggtgcaccagattgccctgaggatggaggtgctgggctgtgaggcccaggacctgtactgattaattaagagcatcttaccgccatttattcccatatttgttctgtttttcttgatttgggtatacatttaaatgttaataaaacaaaatggtggggcaatcatttacatttttagggatatgtaattactagttcaggtgtattgccacaagacaaacatgttaagaaactttcccgttatttacgctctgttcctgttaatcaacctctggattacaaaatttgtgaaagattgactgatattcttaactatgttgctccttttacgctgtgtggatatgctgctttatagcctctgtatctagctattgcttcccgtacggctttcgttttctcctccttgtataaatcctggttgctgtctcttttagaggagttgtggcccgttgtccgtcaacgtggcgtggtgtgctctgtgtttgctgacgcaacccccactggctggggcattgccaccacctgtcaactcctttctgggactttcgctttccccctcccgatcgccacggcagaactcatcgccgcctgccttgcccgctgctggacaggggctaggttgctgggcactgataattccgtggtgttgtctgtgccttctagttgccagccatctgttgtttgcccctcccccgtgccttccttgaccctggaaggtgccactcccactgtcctttcctaataaaatgaggaaattgcatcgcattgtctgagtaggtgtcattctattctggggggtggggtggggcaggacagcaagggggaggattgggaagacaatagcaggcatgctggggatgcggtgggctctatggctctagagcatggctacgtagataagtagcatggcgggttaatcattaactacacctgcaggaggaacccctagtgatggagttggccactccctctctgcgcgctcgctcgctcactgaggccgggcgaccaaaggtcgcccgacgcccgggcggcctcagtgagcgagcgagcgcgcagctgcctgcagg

SEQ ID NO: 40 - DNA, 6250 bp, Artificial Sequence
  Description of Artificial Sequence: Synthetic polynucleotide
cctgcaggcagctgcgcgctcgctcgctcactgaggccgcccgggcaaagcccgggcgtcgggcgacctttggtcgcccggcctcagtgagcgagcgagcgcgcagagagggagtggccaactccatcactaggggttccttgtagttaatgattaacccgccatgctacttatcgcggccgcgggggaggctgctggtgaatattaaccaaggtcaccccagttatcggaggagcaaacaggggctaagtccaccgggggaggctgctggtgaatattaaccaaggtcaccccagttatcggaggagcaaacaggggctaagtccaccgggggaggctgctggtgaatattaaccaaggtcaccccagttatcggaggagcaaacaggggctaagtccacggtacccactgggaggatgttgagtaagatggaaaactactgatgacccttgcagagacagagtattaggacatgtttgaacaggggccgggcgatcagcaggtagctctagaggatccccgtctgtctgcacatttcgtagagcgagtgttccgatactctaatctccctaggcaaggttcatatttgtgtaggttacttattctccttttgttgactaagtcaataatcagaatcagcaggtttggagtcagcttggcagggatcagcagcctgggttggaaggagggggtataaaagccccttcaccaggagaagccgtcacacagatccacaagctcctgaagaggtaagggtttaagggatggttggttggtggggtattaatgtttaattacctggagcacctgcctgaaatcactttttttcaggttggtttaaacgccgccaccatgcaaattgagttatccacctgtttcttcctctgtctcctgaggttctgcttctctgccaccaggagatactacctgggggctgtggagctgtcctgggactacatgcagtcagacctgggggagctgccagttgatgccaggttcccccccagagtccccaagtccttccccttcaacacctcagtggtgtacaaaaagaccctgtttgtggagttcacagaccacctgttcaacatagccaagcccaggcccccctggatgggcctgctgggccccaccatccaggcagaggtttatgacacagtggtcatcaccctgaagaacatggcctcccaccctgtgtccctccatgctgtgggggtgagctactggaaggccagtgagggggcagaatatgatgaccagaccagccagagggagaaggaggatgacaaggtgttcccagggggcagccacacctatgtgtggcaggtcctgaaggagaatggccccatggcctctgaccccctctgcctcacctactcctacctgtcccatgtggacctggtgaaggacctcaactctggcctgattggagccctcctggtgtgcagggaggggagcctggccaaggaaaagacccagaccctgcacaagtttatcctgctctttgcagtctttgatgaggggaagtcctggcacagtgagaccaagaactccctgatgcaggacagagatgctgcctcagccagggcctggcccaagatgcacacagtgaatgggtatgtcaacaggagcctgccaggcctgattgggtgccacagaaagtcagtgtactggcatgtcattggcatgggcaccaccccagaggtgcactccatcttcctggagggccacaccttcctggtgaggaaccacagacaggccagcctggagatcagcccaatcaccttcctcacagcccagaccctcctcatggacctgggccagtttctcctgagctgccacatctcctcccaccagcatgatggcatggaggcctatgtgaaggtggacagctgccctgaggagccccagctcaggatgaagaacaatgaggaggcagaggactatgatgatgatctgacagactctgagatggatgtggtgagatttgatgatgacaacagcccctccttcatccagatcaggtctgtggccaagaagcaccctaagacctgggtgcactacattgcagctgaggaggaggactgggactatgcccccctggtcctggcccctgatgataggtcctacaagtcccagtacctgaacaatggcccccagaggatagggagaaagtacaagaaggtgaggttcatggcctacactgatgagaccttcaagactagggaagccatccagcatgagtctgggatcctgggccccctcctctatggggaggtgggggacaccctgctgatcatcttcaagaaccaggccagcaggccctacaacatttacccccatgggatcacagatgtgagacccctgtacagcaggagactgccaaagggggtgaagcacctgaaggacttccccatcctgccaggggagatcttcaagtacaagtggactgtgacagtggaggatgggcccaccaaatctgaccctagatgcctgaccagatactacagcagctttgtgaacatggagagggacctggcctctggactgattggccctctgctgatctgctacaaggagagtgtggaccagaggggaaaccagatcatgtctgacaagaggaatgtgatcctgttctcagtgtttgatgagaacagatcctggtacctcactgagaacatccagaggttcctgcccaacccagcaggggtgcagctggaggacccagagttccaggcctccaacatcatgcactccatcaatggctatgtctttgactccctgcagctgtcagtgtgcctgcatgaggtggcctactggtacatcctctccattggagcccagactgacttcctgtcagtcttcttcagtggctacaccttcaagcacaagatggtctatgaggacactctgaccctgttccccttctctggggagactgtgttcatgtccatggagaaccctggactgtggatcctgggctgccacaacagtgacttcaggaacaggggcatgactgccctgctgaaggtctccagctgtgacaagaacactggggactactatgaggactcctatgaggacatctctgcctacctgctgtccaagaacaatgccattgagcccaggtccttctcccagaacagcagacacccctccaccaggcagaagcagttcaatgcaaccaccatccctgaaaataccaccctgcagagtgaccaggaggagattgactatgatgacaccatctctgtggagatgaagaaggaggactttgacatctatgatgaggatgagaaccagagccctagaagcttccagaagaagaccagacactacttcattgctgcagtggaaagactgtgggactatgggatgagctcctccccccatgtgctgaggaacagggcccagtctggctctgtgccccagttcaagaaggtggtgttccaggagttcactgatggctccttcacccagcccctgtacaggggagagctgaatgagcacctgggcctgctgggcccctacatcagggctgaggtggaggacaatatcatggtgaccttcagaaaccaggcctccagaccttactccttctacagcagcctgatctcctatgaggaggaccagagacagggggctgagcccaggaagaactttgtgaagcccaatgagaccaagacctacttctggaaggtgcagcaccacatggcccccaccaaggatgagtttgactgcaaggcctgggcctacttctctgatgtggacctggagaaggatgtgcactctggcctgattggccccctgctggtgtgccacaccaacaccctgaaccctgcccatggcaggcaggtgactgtgcaggagtttgccctgttcttcaccatctttgatgagaccaagagctggtacttcactgagaacatggagaggaactgcagggccccctgcaacatccagatggaggaccccaccttcaaggagaactacaggttccatgccatcaatggctacatcatggacaccctgcctggcctggtgatggcccaggaccagaggatcaggtggtacctgctgagcatggggagcaatgagaacatccacagcatccacttctctggccatgtgttcacagtgaggaagaaggaggagtacaagatggccctgtacaacctgtaccctggggtgtttgagacagtggagatgctgccctccaaggctggaatctggagggtggagtgcctgattggggagcacctgcatgctggcatgagcaccctgttcctggtgtacagcaacaagtgccagacccccctgggcatggcctctggccacatcagagacttccagatcacagcctcaggccagtatggccagtgggcccccaagctggccaggctgcactactctggcagcatcaatgcctggtccaccaaggagcccttcagctggatcaaggtggacctcctggcccccatgatcatccatggcatcaagacccagggggccaggcagaagttcagctccctgtacatctcccagttcatcatcatgtactccctggatggcaagaagtggcagacctacagaggcaacagcacaggcaccctgatggtgttctttggcaatgtggacagctctgggatcaagcacaacatcttcaacccccccatcattgccaggtacatcagactgcaccccacccactactccatcaggtccaccctgagaatggagctgatgggctgtgacctgaacagctgcagcatgcccctgggcatggagagcaaggccatctctgatgcccagatcacagccagcagctacttcaccaacatgtttgccacctggtcccccagcaaggccaggctgcacctgcagggcaggagcaatgcctggaggccccaggtgaacaaccccaaggagtggctgcaggtggacttccagaagaccatgaaggtgacaggggtgaccacccagggggtgaagtccctgctgaccagcatgtatgtgaaggagttcctgatcagcagctcccaggatggccaccagtggaccctgttcttccagaatggcaaggtgaaggtgttccagggcaaccaggacagcttcacccctgtggtgaactccctggacccccccctgctgaccagatacctgaggatccacccccagtcctgggtgcaccagattgccctgagaatggaggtgctgggctgtgaggcccaggacctgtactgattaattaagagcatcttaccgccatttattcccatatttgttctgtttttcttgatttgggtatacatttaaatgttaataaaacaaaatggtggggcaatcatttacatttttagggatatgtaattactagttcaggtgtattgccacaagacaaacatgttaagaaactttcccgttatttacgctctgttcctgttaatcaacctctggattacaaaatttgtgaaagattgactgatattcttaactatgttgctccttttacgctgtgtggatatgctgctttatagcctctgtatctagctattgcttcccgtacggctttcgttttctcctccttgtataaatcctggttgctgtctcttttagaggagttgtggcccgttgtccgtcaacgtggcgtggtgtgctctgtgtttgctgacgcaacccccactggctggggcattgccaccacctgtcaactcctttctgggactttcgctttccccctcccgatcgccacggcagaactcatcgccgcctgccttgcccgctgctggacaggggctaggttgctgggcactgataattccgtggtgttgtctgtgccttctagttgccagccatctgttgtttgcccctcccccgtgccttccttgaccctggaaggtgccactcccactgtcctttcctaataaaatgaggaaattgcatcgcattgtctgagtaggtgtcattctattctggggggtggggtggggcaggacagcaagggggaggattgggaagacaatagcaggcatgctggggatgcggtgggctctatggctctagagcatggctacgtagataagtagcatggcgggttaatcattaactacacctgcaggaggaacccctagtgatggagttggccactccctctctgcgcgctcgctcgctcactgaggccgggcgaccaaaggtcgcccgacgcccgggcggcctcagtgagcgagcgagcgcgcagctgcctgcagg

SEQ ID NO: 41 - DNA, 6250 bp, Artificial Sequence
  Description of Artificial Sequence: Synthetic polynucleotide
cctgcaggcagctgcgcgctcgctcgctcactgaggccgcccgggcaaagcccgggcgtcgggcgacctttggtcgcccggcctcagtgagcgagcgagcgcgcagagagggagtggccaactccatcactaggggttccttgtagttaatgattaacccgccatgctacttatcgcggccgcgggggaggctgctggtgaatattaaccaaggtcaccccagttatcggaggagcaaacaggggctaagtccaccgggggaggctgctggtgaatattaaccaaggtcaccccagttatcggaggagcaaacaggggctaagtccaccgggggaggctgctggtgaatattaaccaaggtcaccccagttatcggaggagcaaacaggggctaagtccacggtacccactgggaggatgttgagtaagatggaaaactactgatgacccttgcagagacagagtattaggacatgtttgaacaggggccgggcgatcagcaggtagctctagaggatccccgtctgtctgcacatttcgtagagcgagtgttccgatactctaatctccctaggcaaggttcatatttgtgtaggttacttattctccttttgttgactaagtcaataatcagaatcagcaggtttggagtcagcttggcagggatcagcagcctgggttggaaggagggggtataaaagccccttcaccaggagaagccgtcacacagatccacaagctcctgaagaggtaagggtttaagggatggttggttggtggggtattaatgtttaattacctggagcacctgcctgaaatcactttttttcaggttggtttaaacgccgccaccatgcaaattgagttatccacctgtttcttcctctgtctcctgaggttctgcttctctgccaccaggagatactacctgggggctgtggagctgtcctgggactacatgcagtcagacctgggggagctgccagttgatgccaggttcccccccagagtccccaagtccttccccttcaacacctcagtggtgtacaaaaagaccctgtttgtggagttcacagaccacctgttcaacatagccaagcccaggcccccctggatgggcctgctgggccccaccatccaggcagaggtttatgacacagtggtcatcaccctgaagaacatggcctcccaccctgtgtccctccatgctgtgggggtgagctactggaaggccagtgagggggcagaatatgatgaccagaccagccagagggagaaggaggatgacaaggtgttcccagggggcagccacacctatgtgtggcaggtcctgaaggagaatggccccatggcctctgaccccctctgcctcacctactcctacctgtcccatgtggacctggtgaaggacctcaactctggcctgattggagccctcctggtgtgcagggaggggagcctggccaaggaaaagacccagaccctgcacaagtttatcctgctctttgcagtctttgatgaggggaagtcctggcacagtgagaccaagaactccctgatgcaggacagagatgctgcctcagccagggcctggcccaagatgcacacagtgaatgggtatgtcaacaggagcctgccaggcctgattgggtgccacagaaagtcagtgtactggcatgtcattggcatgggcaccaccccagaggtgcactccatcttcctggagggccacaccttcctggtgaggaaccacagacaggccagcctggagatcagcccaatcaccttcctcacagcccagaccctcctcatggacctgggccagtttctcctgttctgccacatctcctcccaccagcatgatggcatggaggcctatgtgaaggtggacagctgccctgaggagccccagctcaggatgaagaacaatgaggaggcagaggactatgatgatgatctgacagactctgagatggatgtggtgagatttgatgatgacaacagcccctccttcatccagatcaggtctgtggccaagaagcaccctaagacctgggtgcactacattgcagctgaggaggaggactgggactatgcccccctggtcctggcccctgatgataggtcctacaagtcccagtacctgaacaatggcccccagaggatagggagaaagtacaagaaggtgaggttcatggcctacactgatgagaccttcaagactagggaagccatccagcatgagtctgggatcctgggccccctcctctatggggaggtgggggacaccctgctgatcatcttcaagaaccaggccagcaggccctacaacatttacccccatgggatcacagatgtgagacccctgtacagcaggagactgccaaagggggtgaagcacctgaaggacttccccatcctgccaggggagatcttcaagtacaagtggactgtgacagtggaggatgggcccaccaaatctgaccctagatgcctgaccagatactacagcagctttgtgaacatggagagggacctggcctctggactgattggccctctgctgatctgctacaaggagagtgtggaccagaggggaaaccagatcatgtctgacaagaggaatgtgatcctgttctcagtgtttgatgagaacagatcctggtacctcactgagaacatccagaggttcctgcccaacccagcaggggtgcagctggaggacccagagttccaggcctccaacatcatgcactccatcaatggctatgtctttgactccctgcagctgtcagtgtgcctgcatgaggtggcctactggtacatcctctccattggagcccagactgacttcctgtcagtcttcttcagtggctacaccttcaagcacaagatggtctatgaggacactctgaccctgttccccttctctggggagactgtgttcatgtccatggagaaccctggactgtggatcctgggctgccacaacagtgacttcaggaacaggggcatgactgccctgctgaaggtctccagctgtgacaagaacactggggactactatgaggactcctatgaggacatctctgcctacctgctgtccaagaacaatgccattgagcccaggtccttctcccagaacagcagacacccctccaccaggcagaagcagttcaatgcaaccaccatccctgaaaataccaccctgcagagtgaccaggaggagattgactatgatgacaccatctctgtggagatgaagaaggaggactttgacatctatgatgaggatgagaaccagagccctagaagcttccagaagaagaccagacactacttcattgctgcagtggaaagactgtgggactatgggatgagctcctccccccatgtgctgaggaacagggcccagtctggctctgtgccccagttcaagaaggtggtgttccaggagttcactgatggctccttcacccagcccctgtacaggggagagctgaatgagcacctgggcctgctgggcccctacatcagggctgaggtggaggacaatatcatggtgaccttcagaaaccaggcctccagaccttactccttctacagcagcctgatctcctatgaggaggaccagagacagggggctgagcccaggaagaactttgtgaagcccaatgagaccaagacctacttctggaaggtgcagcaccacatggcccccaccaaggatgagtttgactgcaaggcctgggcctacttctctgatgtggacctggagaaggatgtgcactctggcctgattggccccctgctggtgtgccacaccaacaccctgaaccctgcccatggcaggcaggtgactgtgcaggagtttgccctgttcttcaccatctttgatgagaccaagagctggtacttcactgagaacatggagaggaactgcagggccccctgcaacatccagatggaggaccccaccttcaaggagaactacaggttccatgccatcaatggctacatcatggacaccctgcctggcctggtgatggcccaggaccagaggatcaggtggtacctgctgagcatggggagcaatgagaacatccacagcatccacttctctggccatgtgttcacagtgaggaagaaggaggagtacaagatggccctgtacaacctgtaccctggggtgtttgagacagtggagatgctgccctccaaggctggaatctggagggtggagtgcctgattggggagcacctgcatgctggcatgagcaccctgttcctggtgtacagcaacaagtgccagacccccctgggcatggcctctggccacatcagagacttccagatcacagcctcaggccagtatggccagtgggcccccaagctggccaggctgcactactctggcagcatcaatgcctggtccaccaaggagcccttcagctggatcaaggtggacctcctggcccccatgatcatccatggcatcaagacccagggggccaggcagaagttcagctccctgtacatctcccagttcatcatcatgtactccctggatggcaagaagtggcagacctacagaggcaacagcacaggcaccctgatggtgttctttggcaatgtggacagctctgggatcaagcacaacatcttcaacccccccatcattgccaggtacatcagactgcaccccacccactactccatcaggtccaccctgagaatggagctgatgggctgtgacctgaacagctgcagcatgcccctgggcatggagagcaaggccatctctgatgcccagatcacagccagcagctacttcaccaacatgtttgccacctggtcccccagcaaggccaggctgcacctgcagggcaggagcaatgcctggaggccccaggtgaacaaccccaaggagtggctgcaggtggacttccagaagaccatgaaggtgacaggggtgaccacccagggggtgaagtccctgctgaccagcatgtatgtgaaggagttcctgatcagcagctcccaggatggccaccagtggaccctgttcttccagaatggcaaggtgaaggtgttccagggcaaccaggacagcttcacccctgtggtgaactccctggacccccccctgctgaccagatacctgaggatccacccccagtcctgggtgcaccagattgccctgagaatggaggtgctgggctgtgaggcccaggacctgtactgattaattaagagcatcttaccgccatttattcccatatttgttctgtttttcttgatttgggtatacatttaaatgttaataaaacaaaatggtggggcaatcatttacatttttagggatatgtaattactagttcaggtgtattgccacaagacaaacatgttaagaaactttcccgttatttacgctctgttcctgttaatcaacctctggattacaaaatttgtgaaagattgactgatattcttaactatgttgctccttttacgctgtgtggatatgctgctttatagcctctgtatctagctattgcttcccgtacggctttcgttttctcctccttgtataaatcctggttgctgtctcttttagaggagttgtggcccgttgtccgtcaacgtggcgtggtgtgctctgtgtttgctgacgcaacccccactggctggggcattgccaccacctgtcaactcctttctgggactttcgctttccccctcccgatcgccacggcagaactcatcgccgcctgccttgcccgctgctggacaggggctaggttgctgggcactgataattccgtggtgttgtctgtgccttctagttgccagccatctgttgtttgcccctcccccgtgccttccttgaccctggaaggtgccactcccactgtcctttcctaataaaatgaggaaattgcatcgcattgtctgagtaggtgtcattctattctggggggtggggtggggcaggacagcaagggggaggattgggaagacaatagcaggcatgctggggatgcggtgggctctatggctctagagcatggctacgtagataagtagcatggcgggttaatcattaactacacctgcaggaggaacccctagtgatggagttggccactccctctctgcgcgctcgctcgctcactgaggccgggcgaccaaaggtcgcccgacgcccgggcggcctcagtgagcgagcgagcgcgcagctgcctgcagg

SEQ ID NO: 42 - DNA, 6250 bp, Artificial Sequence
  Description of Artificial Sequence: Synthetic polynucleotide
cctgcaggcagctgcgcgctcgctcgctcactgaggccgcccgggcaaagcccgggcgtcgggcgacctttggtcgcccggcctcagtgagcgagcgagcgcgcagagagggagtggccaactccatcactaggggttccttgtagttaatgattaacccgccatgctacttatcgcggccgcgggggaggctgctggtgaatattaaccaaggtcaccccagttatcggaggagcaaacaggggctaagtccaccgggggaggctgctggtgaatattaaccaaggtcaccccagttatcggaggagcaaacaggggctaagtccaccgggggaggctgctggtgaatattaaccaaggtcaccccagttatcggaggagcaaacaggggctaagtccacggtacccactgggaggatgttgagtaagatggaaaactactgatgacccttgcagagacagagtattaggacatgtttgaacaggggccgggcgatcagcaggtagctctagaggatccccgtctgtctgcacatttcgtagagcgagtgttccgatactctaatctccctaggcaaggttcatatttgtgtaggttacttattctccttttgttgactaagtcaataatcagaatcagcaggtttggagtcagcttggcagggatcagcagcctgggttggaaggagggggtataaaagccccttcaccaggagaagccgtcacacagatccacaagctcctgaagaggtaagggtttaagggatggttggttggtggggtattaatgtttaattacctggagcacctgcctgaaatcactttttttcaggttggtttaaacgccgccaccatgcagattgagctgagcacctgcttcttcctgtgcctgctgaggttctgcttctctgccaccaggagatactacctgggggctgtggagctgagctgggactacatgcagtctgacctgggggagctgcctgtggatgccaggttcccccccagagtgcccaagagcttccccttcaacacctctgtggtgtacaagaagaccctgtttgtggagttcactgaccacctgttcaacattgccaagcccaggcccccctggatgggcctgctgggccccaccatccaggctgaggtgtatgacactgtggtgatcaccctgaagaacatggccagccaccctgtgagcctgcatgctgtgggggtgagctactggaaggcctctgagggggctgagtatgatgaccagaccagccagagggagaaggaggatgacaaggtgttccctgggggcagccacacctatgtgtggcaggtgctgaaggagaatggccccatggcctctgaccccctgtgcctgacctacagctacctgagccatgtggacctggtgaaggacctgaactctggcctgattggggccctgctggtgtgcagggagggcagcctggccaaggagaagacccagaccctgcacaagttcatcctgctgtttgctgtgtttgatgagggcaagagctggcactctgaaaccaagaacagcctgatgcaggacagggatgctgcctctgccagggcctggcccaagatgcacactgtgaatggctatgtgaacaggagcctgcctggcctgattggctgccacaggaagtctgtgtactggcatgtgattggcatgggcaccacccctgaggtgcacagcatcttcctggagggccacaccttcctggtcaggaaccacaggcaggccagcctggagatcagccccatcaccttcctgactgcccagaccctgctgatggacctgggccagttcctgctgttctgccacatcagcagccaccagcatgatggcatggaggcctatgtgaaggtggacagctgccctgaggagccccagctgaggatgaagaacaatgaggaggctgaggactatgatgatgacctgactgactctgagatggatgtggtgaggtttgatgatgacaacagccccagcttcatccagatcaggtctgtggccaagaagcaccccaagacctgggtgcactacattgctgctgaggaggaggactgggactatgcccccctggtgctggcccctgatgacaggagctacaagagccagtacctgaacaatggcccccagaggattggcaggaagtacaagaaggtcaggttcatggcctacactgatgaaaccttcaagaccagggaggccatccagcatgagtctggcatcctgggccccctgctgtatggggaggtgggggacaccctgctgatcatcttcaagaaccaggccagcaggccctacaacatctacccccatggcatcactgatgtgaggcccctgtacagcaggaggctgcccaagggggtgaagcacctgaaggacttccccatcctgcctggggagatcttcaagtacaagtggactgtgactgtggaggatggccccaccaagtctgaccccaggtgcctgaccagatactacagcagctttgtgaacatggagagggacctggcctctggcctgattggccccctgctgatctgctacaaggagtctgtggaccagaggggcaaccagatcatgtctgacaagaggaatgtgatcctgttctctgtgtttgatgagaacaggagctggtacctgactgagaacatccagaggttcctgcccaaccctgctggggtgcagctggaggaccctgagttccaggccagcaacatcatgcacagcatcaatggctatgtgtttgacagcctgcagctgtctgtgtgcctgcatgaggtggcctactggtacatcctgagcattggggcccagactgacttcctgtctgtgttcttctctggctacaccttcaagcacaagatggtgtatgaggacaccctgaccctgttccccttctctggggagactgtgttcatgagcatggagaaccctggcctgtggattctgggctgccacaactctgacttcaggaacaggggcatgactgccctgctgaaagtctccagctgtgacaagaacactggggactactatgaggacagctatgaggacatctctgcctacctgctgagcaagaacaatgccattgagcccaggagcttcagccagaatagcaggcaccccagcaccaggcagaagcagttcaatgccaccaccatcccagagaataccaccctgcagtctgaccaggaggagattgactatgatgacaccatctctgtggagatgaagaaggaggactttgacatctacgacgaggacgagaaccagagccccaggagcttccagaagaagaccaggcactacttcattgctgctgtggagaggctgtgggactatggcatgagcagcagcccccatgtgctgaggaacagggcccagtctggctctgtgccccagttcaagaaggtggtgttccaggagttcactgatggcagcttcacccagcccctgtacagaggggagctgaatgagcacctgggcctgctgggcccctacatcagggctgaggtggaggacaacatcatggtgaccttcaggaaccaggccagcaggccctacagcttctacagcagcctgatcagctatgaggaggaccagaggcagggggctgagcccaggaagaactttgtgaagcccaatgaaaccaagacctacttctggaaggtgcagcaccacatggcccccaccaaggatgagtttgactgcaaggcctgggcctacttctctgatgtggacctggagaaggatgtgcactctggcctgattggccccctgctggtgtgccacaccaacaccctgaaccctgcccatggcaggcaggtgactgtgcaggagtttgccctgttcttcaccatctttgatgaaaccaagagctggtacttcactgagaacatggagaggaactgcagggccccctgcaacatccagatggaggaccccaccttcaaggagaactacaggttccatgccatcaatggctacatcatggacaccctgcctggcctggtgatggcccaggaccagaggatcaggtggtacctgctgagcatgggcagcaatgagaacatccacagcatccacttctctggccatgtgttcactgtgaggaagaaggaggagtacaagatggccctgtacaacctgtaccctggggtgtttgagactgtggagatgctgcccagcaaggctggcatctggagggtggagtgcctgattggggagcacctgcatgctggcatgagcaccctgttcctggtgtacagcaacaagtgccagacccccctgggcatggcctctggccacatcagggacttccagatcactgcctctggccagtatggccagtgggcccccaagctggccaggctgcactactctggcagcatcaatgcctggagcaccaaggagcccttcagctggatcaaggtggacctgctggcccccatgatcatccatggcatcaagacccagggggccaggcagaagttcagcagcctgtacatcagccagttcatcatcatgtacagcctggatggcaagaagtggcagacctacaggggcaacagcactggcaccctgatggtgttctttggcaatgtggacagctctggcatcaagcacaacatcttcaacccccccatcattgccagatacatcaggctgcaccccacccactacagcatcaggagcaccctgaggatggagctgatgggctgtgacctgaacagctgcagcatgcccctgggcatggagagcaaggccatctctgatgcccagatcactgccagcagctacttcaccaacatgtttgccacctggagccccagcaaggccaggctgcacctgcagggcaggagcaatgcctggaggccccaggtcaacaaccccaaggagtggctgcaggtggacttccagaagaccatgaaggtgactggggtgaccacccagggggtgaagagcctgctgaccagcatgtatgtgaaggagttcctgatcagcagcagccaggatggccaccagtggaccctgttcttccagaatggcaaggtgaaggtgttccagggcaaccaggacagcttcacccctgtggtgaacagcctggacccccccctgctgaccagatacctgaggattcacccccagagctgggtgcaccagattgccctgaggatggaggtgctgggctgtgaggcccaggacctgtactgattaattaagagcatcttaccgccatttattcccatatttgttctgtttttcttgatttgggtatacatttaaatgttaataaaacaaaatggtggggcaatcatttacatttttagggatatgtaattactagttcaggtgtattgccacaagacaaacatgttaagaaactttcccgttatttacgctctgttcctgttaatcaacctctggattacaaaatttgtgaaagattgactgatattcttaactatgttgctccttttacgctgtgtggatatgctgctttatagcctctgtatctagctattgcttcccgtacggctttcgttttctcctccttgtataaatcctggttgctgtctcttttagaggagttgtggcccgttgtccgtcaacgtggcgtggtgtgctctgtgtttgctgacgcaacccccactggctggggcattgccaccacctgtcaactcctttctgggactttcgctttccccctcccgatcgccacggcagaactcatcgccgcctgccttgcccgctgctggacaggggctaggttgctgggcactgataattccgtggtgttgtctgtgccttctagttgccagccatctgttgtttgcccctcccccgtgccttccttgaccctggaaggtgccactcccactgtcctttcctaataaaatgaggaaattgcatcgcattgtctgagtaggtgtcattctattctggggggtggggtggggcaggacagcaagggggaggattgggaagacaatagcaggcatgctggggatgcggtgggctctatggctctagagcatggctacgtagataagtagcatggcgggttaatcattaactacacctgcaggaggaacccctagtgatggagttggccactccctctctgcgcgctcgctcgctcactgaggccgggcgaccaaaggtcgcccgacgcccgggcggcctcagtgagcgagcgagcgcgcagctgcctgcagg

SEQ ID NO: 43 - DNA, 6250 bp, Artificial Sequence
  Description of Artificial Sequence: Synthetic polynucleotide
cctgcaggcagctgcgcgctcgctcgctcactgaggccgcccgggcaaagcccgggcgtcgggcgacctttggtcgcccggcctcagtgagcgagcgagcgcgcagagagggagtggccaactccatcactaggggttccttgtagttaatgattaacccgccatgctacttatcgcggccgcgggggaggctgctggtgaatattaaccaaggtcaccccagttatcggaggagcaaacaggggctaagtccaccgggggaggctgctggtgaatattaaccaaggtcaccccagttatcggaggagcaaacaggggctaagtccaccgggggaggctgctggtgaatattaaccaaggtcaccccagttatcggaggagcaaacaggggctaagtccacggtacccactgggaggatgttgagtaagatggaaaactactgatgacccttgcagagacagagtattaggacatgtttgaacaggggccgggcgatcagcaggtagctctagaggatccccgtctgtctgcacatttcgtagagcgagtgttccgatactctaatctccctaggcaaggttcatatttgtgtaggttacttattctccttttgttgactaagtcaataatcagaatcagcaggtttggagtcagcttggcagggatcagcagcctgggttggaaggagggggtataaaagccccttcaccaggagaagccgtcacacagatccacaagctcctgaagaggtaagggtttaagggatggttggttggtggggtattaatgtttaattacctggagcacctgcctgaaatcactttttttcaggttgggttaaacgccgccaccatgcagattgagctgagcacctgcttcttcctgtgcctgctgaggttctgcttctctgccaccaggagatactacctgggggctgtggagctgagctgggactacatgcagtctgacctgggggagctgcctgtggatgccaggttcccccccagagtgcccaagagcttccccttcaacacctctgtggtgtacaagaagaccctgtttgtggagttcactgaccacctgttcaacattgccaagcccaggcccccctggatgggcctgctgggccccaccatccaggctgaggtgtatgacactgtggtgatcaccctgaagaacatggccagccaccctgtgagcctgcatgctgtgggggtgagctactggaaggcctctgagggggctgagtatgatgaccagaccagccagagggagaaggaggatgacaaggtgttccctgggggcagccacacctatgtgtggcaggtgctgaaggagaatggccccatggcctctgaccccctgtgcctgacctacagctacctgagccatgtggacctggtgaaggacctgaactctggcctgattggggccctgctggtgtgcagggagggcagcctggccaaggagaagacccagaccctgcacaagttcatcctgctgtttgctgtgtttgatgagggcaagagctggcactctgaaaccaagaacagcctgatgcaggacagggatgctgcctctgccagggcctggcccaagatgcacactgtgaatggctatgtgaacaggagcctgcctggcctgattggctgccacaggaagtctgtgtactggcatgtgattggcatgggcaccacccctgaggtgcacagcatcttcctggagggccacaccttcctggtcaggaaccacaggcaggccagcctggagatcagccccatcaccttcctgactgcccagaccctgctgatggacctgggccagttcctgctgttctgccacatcagcagccaccagcatgatggcatggaggcctatgtgaaggtggacagctgccctgaggagccccagctgaggatgaagaacaatgaggaggctgaggactatgatgatgacctgactgactctgagatggatgtggtgaggtttgatgatgacaacagccccagcttcatccagatcaggtctgtggccaagaagcaccccaagacctgggtgcactacattgctgctgaggaggaggactgggactatgcccccctggtgctggcccctgatgacaggagctacaagagccagtacctgaacaatggcccccagaggattggcaggaagtacaagaaggtcaggttcatggcctacactgatgaaaccttcaagaccagggaggccatccagcatgagtctggcatcctgggccccctgctgtatggggaggtgggggacaccctgctgatcatcttcaagaaccaggccagcaggccctacaacatctacccccatggcatcactgatgtgaggcccctgtacagcaggaggctgcccaagggggtgaagcacctgaaggacttccccatcctgcctggggagatcttcaagtacaagtggactgtgactgtggaggatggccccaccaagtctgaccccaggtgcctgaccagatactacagcagctttgtgaacatggagagggacctggcctctggcctgattggccccctgctgatctgctacaaggagtctgtggaccagaggggcaaccagatcatgtctgacaagaggaatgtgatcctgttctctgtgtttgatgagaacaggagctggtacctgactgagaacatccagaggttcctgcccaaccctgctggggtgcagctggaggaccctgagttccaggccagcaacatcatgcacagcatcaatggctatgtgtttgacagcctgcagctgtctgtgtgcctgcatgaggtggcctactggtacatcctgagcattggggcccagactgacttcctgtctgtgttcttctctggctacaccttcaagcacaagatggtgtatgaggacaccctgaccctgttccccttctctggggagactgtgttcatgagcatggagaaccctggcctgtggattctgggctgccacaactctgacttcaggaacaggggcatgactgccctgctgaaagtctccagctgtgacaagaacactggggactactatgaggacagctatgaggacatctctgcctacctgctgagcaagaacaatgccattgagcccaggagcttcagccagaatagcaggcaccccagcaccaggcagaagcagttcaatgccaccaccatcccagagaataccaccctgcagtctgaccaggaggagattgactatgatgacaccatctctgtggagatgaagaaggaggactttgacatctacgacgaggacgagaaccagagccccaggagcttccagaagaagaccaggcactacttcattgctgctgtggagaggctgtgggactatggcatgagcagcagcccccatgtgctgaggaacagggcccagtctggctctgtgccccagttcaagaaggtggtgttccaggagttcactgatggcagcttcacccagcccctgtacagaggggagctgaatgagcacctgggcctgctgggcccctacatcagggctgaggtggaggacaacatcatggtgaccttcaggaaccaggccagcaggccctacagcttctacagcagcctgatcagctatgaggaggaccagaggcagggggctgagcccaggaagaactttgtgaagcccaatgaaaccaagacctacttctggaaggtgcagcaccacatggcccccaccaaggatgagtttgactgcaaggcctgggcctacttctctgatgtggacctggagaaggatgtgcactctggcctgattggccccctgctggtgtgccacaccaacaccctgaaccctgcccatggcaggcaggtgactgtgcaggagtttgccctgttcttcaccatctttgatgaaaccaagagctggtacttcactgagaacatggagaggaactgcagggccccctgcaacatccagatggaggaccccaccttcaaggagaactacaggttccatgccatcaatggctacatcatggacaccctgcctggcctggtgatggcccaggaccagaggatcaggtggtacctgctgagcatgggcagcaatgagaacatccacagcatccacttctctggccatgtgttcactgtgaggaagaaggaggagtacaagatggccctgtacaacctgtaccctggggtgtttgagactgtggagatgctgcccagcaaggctggcatctggagggtggagtgcctgattggggagcacctgcatgctggcatgagcaccctgttcctggtgtacagcaacaagtgccagacccccctgggcatggcctctggccacatcagggacttccagatcactgcctctggccagtatggccagtgggcccccaagctggccaggctgcactactctggcagcatcaatgcctggagcaccaaggagcccttcagctggatcaaggtggacctgctggcccccatgatcatccatggcatcaagacccagggggccaggcagaagttcagcagcctgtacatcagccagttcatcatcatgtacagcctggatggcaagaagtggcagacctacaggggcaacagcactggcaccctgatggtgttctttggcaatgtggacagctctggcatcaagcacaacatcttcaacccccccatcattgccagatacatcaggctgcaccccacccactacagcatcaggagcaccctgaggatggagctgatgggctgtgacctgaacagctgcagcatgcccctgggcatggagagcaaggccatctctgatgcccagatcactgccagcagctacttcaccaacatgtttgccacctggagccccagcaaggccaggctgcacctgcagggcaggagcaatgcctggaggccccaggtcaacaaccccaaggagtggctgcaggtggacttccagaagaccatgaaggtgactggggtgaccacccagggggtgaagagcctgctgaccagcatgtatgtgaaggagttcctgatcagcagcagccaggatggccaccagtggaccctgttcttccagaatggcaaggtgaaggtgttccagggcaaccaggacagcttcacccctgtggtgaacagcctggacccccccctgctgaccagatacctgaggattcacccccagagctgggtgcaccagattgccctgaggatggaggtgctgggctgtgaggcccaggacctgtactgattaattaagagcatcttaccgccatttattcccatatttgttctgtttttcttgatttgggtatacatttaaatgttaataaaacaaaatggtggggcaatcatttacatttttagggatatgtaattactagttcaggtgtattgccacaagacaaacatgttaagaaactttcccgttatttacgctctgttcctgttaatcaacctctggattacaaaatttgtgaaagattgactgatattcttaactatgttgctccttttacgctgtgtggatatgctgctttatagcctctgtatctagctattgcttcccgtacggctttcgttttctcctccttgtataaatcctggttgctgtctcttttagaggagttgtggcccgttgtccgtcaacgtggcgtggtgtgctctgtgtttgctgacgcaacccccactggctggggcattgccaccacctgtcaactcctttctgggactttcgctttccccctcccgatcgccacggcagaactcatcgccgcctgccttgcccgctgctggacaggggctaggttgctgggcactgataattccgtggtgttgtctgtgccttctagttgccagccatctgttgtttgcccctcccccgtgccttccttgaccctggaaggtgccactcccactgtcctttcctaataaaatgaggaaattgcatcgcattgtctgagtaggtgtcattctattctggggggtggggtggggcaggacagcaagggggaggattgggaagacaatagcaggcatgctggggatgcggtgggctctatggctctagagcatggctacgtagataagtagcatggcgggttaatcattaactacacctgcaggaggaacccctagtgatggagttggccactccctctctgcgcgctcgctcgctcactgaggccgggcgaccaaaggtcgcccgacgcccgggcggcctcagtgagcgagcgagcgcgcagctgcctgcagg

SEQ ID NO: 44 - DNA, 6167 bp, Artificial Sequence
  Description of Artificial Sequence: Synthetic polynucleotide
cctgcaggcagctgcgcgctcgctcgctcactgaggccgcccgggcaaagcccgggcgtcgggcgacctttggtcgcccggcctcagtgagcgagcgagcgcgcagagagggagtggccaactccatcactaggggttccttgtagttaatgattaacccgccatgctacttatcgcggccgccggtacgcgggggaggctgctggtgaatattaaccaaggtcaccccagttatcggaggagcaaacaggggctaagtccaccgggggaggctgctggtgaatattaaccaaggtcaccccagttatcggaggagcaaacaggggctaagtccaccgggggaggctgctggtgaatattaaccaaggtcaccccagttatcggaggagcaaacaggggctaagtccactgtacaacgcgtgaattcgctagcgtctgtctgcacatttcgtagagcgagtgttccgatactctaatctccctaggcaaggttcatatttgtgtaggttacttattctccttttgttgactaagtcaataatcagaatcagcaggtttggagtcagcttggcagggatcagcagcctgggttggaaggagggggtataaaagccccttcaccaggagaagccgtcacacagatccacaagctcctgtctagaaagaggtaagggtttaagggatggttggttggtggggtattaatgtttaattacctggagcacctgcctgaaatcactttttttcaggttggtttaaacgccgccaccatgcaaattgagttatccacctgtttcttcctctgtctcctgaggttctgcttctctgccaccaggagatactacctgggggctgtggagctgtcctgggactacatgcagtcagacctgggggagctgccagttgatgccaggttcccccccagagtccccaagtccttccccttcaacacctcagtggtgtacaaaaagaccctgtttgtggagttcacagaccacctgttcaacatagccaagcccaggcccccctggatgggcctgctgggccccaccatccaggcagaggtttatgacacagtggtcatcaccctgaagaacatggcctcccaccctgtgtccctccatgctgtgggggtgagctactggaaggccagtgagggggcagaatatgatgaccagaccagccagagggagaaggaggatgacaaggtgttcccagggggcagccacacctatgtgtggcaggtcctgaaggagaatggccccatggcctctgaccccctctgcctcacctactcctacctgtcccatgtggacctggtgaaggacctcaactctggcctgattggagccctcctggtgtgcagggaggggagcctggccaaggaaaagacccagaccctgcacaagtttatcctgctctttgcagtctttgatgaggggaagtcctggcacagtgagaccaagaactccctgatgcaggacagagatgctgcctcagccagggcctggcccaagatgcacacagtgaatgggtatgtcaacaggagcctgccaggcctgattgggtgccacagaaagtcagtgtactggcatgtcattggcatgggcaccaccccagaggtgcactccatcttcctggagggccacaccttcctggtgaggaaccacagacaggccagcctggagatcagcccaatcaccttcctcacagcccagaccctcctcatggacctgggccagtttctcctgttctgccacatctcctcccaccagcatgatggcatggaggcctatgtgaaggtggacagctgccctgaggagccccagctcaggatgaagaacaatgaggaggcagaggactatgatgatgatctgacagactctgagatggatgtggtgagatttgatgatgacaacagcccctccttcatccagatcaggtctgtggccaagaagcaccctaagacctgggtgcactacattgcagctgaggaggaggactgggactatgcccccctggtcctggcccctgatgataggtcctacaagtcccagtacctgaacaatggcccccagaggatagggagaaagtacaagaaggtgaggttcatggcctacactgatgagaccttcaagactagggaagccatccagcatgagtctgggatcctgggccccctcctctatggggaggtgggggacaccctgctgatcatcttcaagaaccaggccagcaggccctacaacatttacccccatgggatcacagatgtgagacccctgtacagcaggagactgccaaagggggtgaagcacctgaaggacttccccatcctgccaggggagatcttcaagtacaagtggactgtgacagtggaggatgggcccaccaaatctgaccctagatgcctgaccagatactacagcagctttgtgaacatggagagggacctggcctctggactgattggccctctgctgatctgctacaaggagagtgtggaccagaggggaaaccagatcatgtctgacaagaggaatgtgatcctgttctcagtgtttgatgagaacagatcctggtacctcactgagaacatccagaggttcctgcccaacccagcaggggtgcagctggaggacccagagttccaggcctccaacatcatgcactccatcaatggctatgtctttgactccctgcagctgtcagtgtgcctgcatgaggtggcctactggtacatcctctccattggagcccagactgacttcctgtcagtcttcttcagtggctacaccttcaagcacaagatggtctatgaggacactctgaccctgttccccttctctggggagactgtgttcatgtccatggagaaccctggactgtggatcctgggctgccacaacagtgacttcaggaacaggggcatgactgccctgctgaaggtctccagctgtgacaagaacactggggactactatgaggactcctatgaggacatctctgcctacctgctgtccaagaacaatgccattgagcccaggtccttctcccagaacagcagacacccctccaccaggcagaagcagttcaatgcaaccaccatccctgaaaataccaccctgcagagtgaccaggaggagattgactatgatgacaccatctctgtggagatgaagaaggaggactttgacatctatgatgaggatgagaaccagagccctagaagcttccagaagaagaccagacactacttcattgctgcagtggaaagactgtgggactatgggatgagctcctccccccatgtgctgaggaacagggcccagtctggctctgtgccccagttcaagaaggtggtgttccaggagttcactgatggctccttcacccagcccctgtacaggggagagctgaatgagcacctgggcctgctgggcccctacatcagggctgaggtggaggacaatatcatggtgaccttcagaaaccaggcctccagaccttactccttctacagcagcctgatctcctatgaggaggaccagagacagggggctgagcccaggaagaactttgtgaagcccaatgagaccaagacctacttctggaaggtgcagcaccacatggcccccaccaaggatgagtttgactgcaaggcctgggcctacttctctgatgtggacctggagaaggatgtgcactctggcctgattggccccctgctggtgtgccacaccaacaccctgaaccctgcccatggcaggcaggtgactgtgcaggagtttgccctgttcttcaccatctttgatgagaccaagagctggtacttcactgagaacatggagaggaactgcagggccccctgcaacatccagatggaggaccccaccttcaaggagaactacaggttccatgccatcaatggctacatcatggacaccctgcctggcctggtgatggcccaggaccagaggatcaggtggtacctgctgagcatggggagcaatgagaacatccacagcatccacttctctggccatgtgttcacagtgaggaagaaggaggagtacaagatggccctgtacaacctgtaccctggggtgtttgagacagtggagatgctgccctccaaggctggaatctggagggtggagtgcctgattggggagcacctgcatgctggcatgagcaccctgttcctggtgtacagcaacaagtgccagacccccctgggcatggcctctggccacatcagagacttccagatcacagcctcaggccagtatggccagtgggcccccaagctggccaggctgcactactctggcagcatcaatgcctggtccaccaaggagcccttcagctggatcaaggtggacctcctggcccccatgatcatccatggcatcaagacccagggggccaggcagaagttcagctccctgtacatctcccagttcatcatcatgtactccctggatggcaagaagtggcagacctacagaggcaacagcacaggcaccctgatggtgttctttggcaatgtggacagctctgggatcaagcacaacatcttcaacccccccatcattgccaggtacatcagactgcaccccacccactactccatcaggtccaccctgagaatggagctgatgggctgtgacctgaacagctgcagcatgcccctgggcatggagagcaaggccatctctgatgcccagatcacagccagcagctacttcaccaacatgtttgccacctggtcccccagcaaggccaggctgcacctgcagggcaggagcaatgcctggaggccccaggtgaacaaccccaaggagtggctgcaggtggacttccagaagaccatgaaggtgacaggggtgaccacccagggggtgaagtccctgctgaccagcatgtatgtgaaggagttcctgatcagcagctcccaggatggccaccagtggaccctgttcttccagaatggcaaggtgaaggtgttccagggcaaccaggacagcttcacccctgtggtgaactccctggacccccccctgctgaccagatacctgaggatccacccccagtcctgggtgcaccagattgccctgagaatggaggtgctgggctgtgaggcccaggacctgtactgattaattaagagcatcttaccgccatttattcccatatttgttctgtttttcttgatttgggtatacatttaaatgttaataaaacaaaatggtggggcaatcatttacatttttagggatatgtaattactagttcaggtgtattgccacaagacaaacatgttaagaaactttcccgttatttacgctctgttcctgttaatcaacctctggattacaaaatttgtgaaagattgactgatattcttaactatgttgctccttttacgctgtgtggatatgctgctttatagcctctgtatctagctattgcttcccgtacggctttcgttttctcctccttgtataaatcctggttgctgtctcttttagaggagttgtggcccgttgtccgtcaacgtggcgtggtgtgctctgtgtttgctgacgcaacccccactggctggggcattgccaccacctgtcaactcctttctgggactttcgctttccccctcccgatcgccacggcagaactcatcgccgcctgccttgcccgctgctggacaggggctaggttgctgggcactgataattccgtggtgttgtctgtgccttctagttgccagccatctgttgtttgcccctcccccgtgccttccttgaccctggaaggtgccactcccactgtcctttcctaataaaatgaggaaattgcatcgcattgtctgagtaggtgtcattctattctggggggtggggtggggcaggacagcaagggggaggattgggaagacaatagcaggcatgctggggatgcggtgggctctatggctctagagcatggctacgtagataagtagcatggcgggttaatcattaactacacctgcaggaggaacccctagtgatggagttggccactccctctctgcgcgctcgctcgctcactgaggccgggcgaccaaaggtcgcccgacgcccgggcggcctcagtgagcgagcgagcgcgcagctgcctgcagg

SEQ ID NO: 45 - DNA, 6167 bp, Artificial Sequence
  Description of Artificial Sequence: Synthetic polynucleotide
cctgcaggcagctgcgcgctcgctcgctcactgaggccgcccgggcaaagcccgggcgtcgggcgacctttggtcgcccggcctcagtgagcgagcgagcgcgcagagagggagtggccaactccatcactaggggttccttgtagttaatgattaacccgccatgctacttatcgcggccgccggtacgcgggggaggctgctggtgaatattaaccaaggtcaccccagttatcggaggagcaaacaggggctaagtccaccgggggaggctgctggtgaatattaaccaaggtcaccccagttatcggaggagcaaacaggggctaagtccaccgggggaggctgctggtgaatattaaccaaggtcaccccagttatcggaggagcaaacaggggctaagtccactgtacaacgcgtgaattcgctagcgtctgtctgcacatttcgtagagcgagtgttccgatactctaatctccctaggcaaggttcatatttgtgtaggttacttattctccttttgttgactaagtcaataatcagaatcagcaggtttggagtcagcttggcagggatcagcagcctgggttggaaggagggggtataaaagccccttcaccaggagaagccgtcacacagatccacaagctcctgtctagaaagaggtaagggtttaagggatggttggttggtggggtattaatgtttaattacctggagcacctgcctgaaatcactttttttcaggttgggttaaacgccgccaccatgcagattgagctgagcacctgcttcttcctgtgcctgctgaggttctgcttctctgccaccaggagatactacctgggggctgtggagctgagctgggactacatgcagtctgacctgggggagctgcctgtggatgccaggttcccccccagagtgcccaagagcttccccttcaacacctctgtggtgtacaagaagaccctgtttgtggagttcactgaccacctgttcaacattgccaagcccaggcccccctggatgggcctgctgggccccaccatccaggctgaggtgtatgacactgtggtgatcaccctgaagaacatggccagccaccctgtgagcctgcatgctgtgggggtgagctactggaaggcctctgagggggctgagtatgatgaccagaccagccagagggagaaggaggatgacaaggtgttccctgggggcagccacacctatgtgtggcaggtgctgaaggagaatggccccatggcctctgaccccctgtgcctgacctacagctacctgagccatgtggacctggtgaaggacctgaactctggcctgattggggccctgctggtgtgcagggagggcagcctggccaaggagaagacccagaccctgcacaagttcatcctgctgtttgctgtgtttgatgagggcaagagctggcactctgaaaccaagaacagcctgatgcaggacagggatgctgcctctgccagggcctggcccaagatgcacactgtgaatggctatgtgaacaggagcctgcctggcctgattggctgccacaggaagtctgtgtactggcatgtgattggcatgggcaccacccctgaggtgcacagcatcttcctggagggccacaccttcctggtcaggaaccacaggcaggccagcctggagatcagccccatcaccttcctgactgcccagaccctgctgatggacctgggccagttcctgctgagctgccacatcagcagccaccagcatgatggcatggaggcctatgtgaaggtggacagctgccctgaggagccccagctgaggatgaagaacaatgaggaggctgaggactatgatgatgacctgactgactctgagatggatgtggtgaggtttgatgatgacaacagccccagcttcatccagatcaggtctgtggccaagaagcaccccaagacctgggtgcactacattgctgctgaggaggaggactgggactatgcccccctggtgctggcccctgatgacaggagctacaagagccagtacctgaacaatggcccccagaggattggcaggaagtacaagaaggtcaggttcatggcctacactgatgaaaccttcaagaccagggaggccatccagcatgagtctggcatcctgggccccctgctgtatggggaggtgggggacaccctgctgatcatcttcaagaaccaggccagcaggccctacaacatctacccccatggcatcactgatgtgaggcccctgtacagcaggaggctgcccaagggggtgaagcacctgaaggacttccccatcctgcctggggagatcttcaagtacaagtggactgtgactgtggaggatggccccaccaagtctgaccccaggtgcctgaccagatactacagcagctttgtgaacatggagagggacctggcctctggcctgattggccccctgctgatctgctacaaggagtctgtggaccagaggggcaaccagatcatgtctgacaagaggaatgtgatcctgttctctgtgtttgatgagaacaggagctggtacctgactgagaacatccagaggttcctgcccaaccctgctggggtgcagctggaggaccctgagttccaggccagcaacatcatgcacagcatcaatggctatgtgtttgacagcctgcagctgtctgtgtgcctgcatgaggtggcctactggtacatcctgagcattggggcccagactgacttcctgtctgtgttcttctctggctacaccttcaagcacaagatggtgtatgaggacaccctgaccctgttccccttctctggggagactgtgttcatgagcatggagaaccctggcctgtggattctgggctgccacaactctgacttcaggaacaggggcatgactgccctgctgaaagtctccagctgtgacaagaacactggggactactatgaggacagctatgaggacatctctgcctacctgctgagcaagaacaatgccattgagcccaggagcttcagccagaatagcaggcaccccagcaccaggcagaagcagttcaatgccaccaccatcccagagaataccaccctgcagtctgaccaggaggagattgactatgatgacaccatctctgtggagatgaagaaggaggactttgacatctacgacgaggacgagaaccagagccccaggagcttccagaagaagaccaggcactacttcattgctgctgtggagaggctgtgggactatggcatgagcagcagcccccatgtgctgaggaacagggcccagtctggctctgtgccccagttcaagaaggtggtgttccaggagttcactgatggcagcttcacccagcccctgtacagaggggagctgaatgagcacctgggcctgctgggcccctacatcagggctgaggtggaggacaacatcatggtgaccttcaggaaccaggccagcaggccctacagcttctacagcagcctgatcagctatgaggaggaccagaggcagggggctgagcccaggaagaactttgtgaagcccaatgaaaccaagacctacttctggaaggtgcagcaccacatggcccccaccaaggatgagtttgactgcaaggcctgggcctacttctctgatgtggacctggagaaggatgtgcactctggcctgattggccccctgctggtgtgccacaccaacaccctgaaccctgcccatggcaggcaggtgactgtgcaggagtttgccctgttcttcaccatctttgatgaaaccaagagctggtacttcactgagaacatggagaggaactgcagggccccctgcaacatccagatggaggaccccaccttcaaggagaactacaggttccatgccatcaatggctacatcatggacaccctgcctggcctggtgatggcccaggaccagaggatcaggtggtacctgctgagcatgggcagcaatgagaacatccacagcatccacttctctggccatgtgttcactgtgaggaagaaggaggagtacaagatggccctgtacaacctgtaccctggggtgtttgagactgtggagatgctgcccagcaaggctggcatctggagggtggagtgcctgattggggagcacctgcatgctggcatgagcaccctgttcctggtgtacagcaacaagtgccagacccccctgggcatggcctctggccacatcagggacttccagatcactgcctctggccagtatggccagtgggcccccaagctggccaggctgcactactctggcagcatcaatgcctggagcaccaaggagcccttcagctggatcaaggtggacctgctggcccccatgatcatccatggcatcaagacccagggggccaggcagaagttcagcagcctgtacatcagccagttcatcatcatgtacagcctggatggcaagaagtggcagacctacaggggcaacagcactggcaccctgatggtgttctttggcaatgtggacagctctggcatcaagcacaacatcttcaacccccccatcattgccagatacatcaggctgcaccccacccactacagcatcaggagcaccctgaggatggagctgatgggctgtgacctgaacagctgcagcatgcccctgggcatggagagcaaggccatctctgatgcccagatcactgccagcagctacttcaccaacatgtttgccacctggagccccagcaaggccaggctgcacctgcagggcaggagcaatgcctggaggccccaggtcaacaaccccaaggagtggctgcaggtggacttccagaagaccatgaaggtgactggggtgaccacccagggggtgaagagcctgctgaccagcatgtatgtgaaggagttcctgatcagcagcagccaggatggccaccagtggaccctgttcttccagaatggcaaggtgaaggtgttccagggcaaccaggacagcttcacccctgtggtgaacagcctggacccccccctgctgaccagatacctgaggattcacccccagagctgggtgcaccagattgccctgaggatggaggtgctgggctgtgaggcccaggacctgtactgattaattaagagcatcttaccgccatttattcccatatttgttctgtttttcttgatttgggtatacatttaaatgttaataaaacaaaatggtggggcaatcatttacatttttagggatatgtaattactagttcaggtgtattgccacaagacaaacatgttaagaaactttcccgttatttacgctctgttcctgttaatcaacctctggattacaaaatttgtgaaagattgactgatattcttaactatgttgctccttttacgctgtgtggatatgctgctttatagcctctgtatctagctattgcttcccgtacggctttcgttttctcctccttgtataaatcctggttgctgtctcttttagaggagttgtggcccgttgtccgtcaacgtggcgtggtgtgctctgtgtttgctgacgcaacccccactggctggggcattgccaccacctgtcaactcctttctgggactttcgctttccccctcccgatcgccacggcagaactcatcgccgcctgccttgcccgctgctggacaggggctaggttgctgggcactgataattccgtggtgttgtctgtgccttctagttgccagccatctgttgtttgcccctcccccgtgccttccttgaccctggaaggtgccactcccactgtcctttcctaataaaatgaggaaattgcatcgcattgtctgagtaggtgtcattctattctggggggtggggtggggcaggacagcaagggggaggattgggaagacaatagcaggcatgctggggatgcggtgggctctatggctctagagcatggctacgtagataagtagcatggcgggttaatcattaactacacctgcaggaggaacccctagtgatggagttggccactccctctctgcgcgctcgctcgctcactgaggccgggcgaccaaaggtcgcccgacgcccgggcggcctcagtgagcgagcgagcgcgcagctgcctgcagg

SEQ ID NO: 46 - DNA, 6250 bp, Artificial Sequence
  Description of Artificial Sequence: Synthetic polynucleotide
cctgcaggcagctgcgcgctcgctcgctcactgaggccgcccgggcaaagcccgggcgtcgggcgacctttggtcgcccggcctcagtgagcgagcgagcgcgcagagagggagtggccaactccatcactaggggttccttgtagttaatgattaacccgccatgctacttatcgcggccgcgggggaggctgctggtgaatattaaccaaggtcaccccagttatcggaggagcaaacaggggctaagtccaccgggggaggctgctggtgaatattaaccaaggtcaccccagttatcggaggagcaaacaggggctaagtccaccgggggaggctgctggtgaatattaaccaaggtcaccccagttatcggaggagcaaacaggggctaagtccacggtacccactgggaggatgttgagtaagatggaaaactactgatgacccttgcagagacagagtattaggacatgtttgaacaggggccgggcgatcagcaggtagcactagaggatccccgtctgtctgcacatttcgtagagcgagtgttccgatactctaatctccctaggcaaggttcatatttgtgtaggttacttattctccttttgttgactaagtcaataatcagaatcagcaggtttggagtcagcttggcagggatcagcagcctgggttggaaggagggggtataaaagccccttcaccaggagaagccgtcacacagatccacaagctcctgaagaggtaagggtttaagggatggttggttggtggggtattaatgtttaattacctggagcacctgcctgaaatcactttttttcaggttggtttaaacgccgccaccatgcaaattgagttatccacctgtttcttcctctgtctcctgaggttctgcttctctgccaccaggagatactacctgggggctgtggagctgtcctgggactacatgcagtcagacctgggggagctgccagttgatgccaggttcccccccagagtccccaagtccttccccttcaacacctcagtggtgtacaaaaagaccctgtttgtggagttcacagaccacctgttcaacatagccaagcccaggcccccctggatgggcctgctgggccccaccatccaggcagaggtttatgacacagtggtcatcaccctgaagaacatggcctcccaccctgtgtccctccatgctgtgggggtgagctactggaaggccagtgagggggcagaatatgatgaccagaccagccagagggagaaggaggatgacaaggtgttcccagggggcagccacacctatgtgtggcaggtcctgaaggagaatggccccatggcctctgaccccctctgcctcacctactcctacctgtcccatgtggacctggtgaaggacctcaactctggcctgattggagccctcctggtgtgcagggaggggagcctggccaaggaaaagacccagaccctgcacaagtttatcctgctctttgcagtctttgatgaggggaagtcctggcacagtgagaccaagaactccctgatgcaggacagagatgctgcctcagccagggcctggcccaagatgcacacagtgaatgggtatgtcaacaggagcctgccaggcctgattgggtgccacagaaagtcagtgtactggcatgtcattggcatgggcaccaccccagaggtgcactccatcttcctggagggccacaccttcctggtgaggaaccacagacaggccagcctggagatcagcccaatcaccttcctcacagcccagaccctcctcatggacctgggccagtttctcctgagctgccacatctcctcccaccagcatgatggcatggaggcctatgtgaaggtggacagctgccctgaggagccccagctcaggatgaagaacaatgaggaggcagaggactatgatgatgatctgacagactctgagatggatgtggtgagatttgatgatgacaacagcccctccttcatccagatcaggtctgtggccaagaagcaccctaagacctgggtgcactacattgcagctgaggaggaggactgggactatgcccccctggtcctggcccctgatgataggtcctacaagtcccagtacctgaacaatggcccccagaggatagggagaaagtacaagaaggtgaggttcatggcctacactgatgagaccttcaagactagggaagccatccagcatgagtctgggatcctgggccccctcctctatggggaggtgggggacaccctgctgatcatcttcaagaaccaggccagcaggccctacaacatttacccccatgggatcacagatgtgagacccctgtacagcaggagactgccaaagggggtgaagcacctgaaggacttccccatcctgccaggggagatcttcaagtacaagtggactgtgacagtggaggatgggcccaccaaatctgaccctagatgcctgaccagatactacagcagctttgtgaacatggagagggacctggcctctggactgattggccctctgctgatctgctacaaggagagtgtggaccagaggggaaaccagatcatgtctgacaagaggaatgtgatcctgttctcagtgtttgatgagaacagatcctggtacctcactgagaacatccagaggttcctgcccaacccagcaggggtgcagctggaggacccagagttccaggcctccaacatcatgcactccatcaatggctatgtctttgactccctgcagctgtcagtgtgcctgcatgaggtggcctactggtacatcctctccattggagcccagactgacttcctgtcagtcttcttcagtggctacaccttcaagcacaagatggtctatgaggacactctgaccctgttccccttctctggggagactgtgttcatgtccatggagaaccctggactgtggatcctgggctgccacaacagtgacttcaggaacaggggcatgactgccctgctgaaggtctccagctgtgacaagaacactggggactactatgaggactcctatgaggacatctctgcctacctgctgtccaagaacaatgccattgagcccaggtccttctcccagaacagcagacacccctccaccaggcagaagcagttcaatgcaaccaccatccctgaaaataccaccctgcagagtgaccaggaggagattgactatgatgacaccatctctgtggagatgaagaaggaggactttgacatctatgatgaggatgagaaccagagccctagaagcttccagaagaagaccagacactacttcattgctgcagtggaaagactgtgggactatgggatgagctcctccccccatgtgctgaggaacagggcccagtctggctctgtgccccagttcaagaaggtggtgttccaggagttcactgatggctccttcacccagcccctgtacaggggagagctgaatgagcacctgggcctgctgggcccctacatcagggctgaggtggaggacaatatcatggtgaccttcagaaaccaggcctccagaccttactccttctacagcagcctgatctcctatgaggaggaccagagacagggggctgagcccaggaagaactttgtgaagcccaatgagaccaagacctacttctggaaggtgcagcaccacatggcccccaccaaggatgagtttgactgcaaggcctgggcctacttctctgatgtggacctggagaaggatgtgcactctggcctgattggccccctgctggtgtgccacaccaacaccctgaaccctgcccatggcaggcaggtgactgtgcaggagtttgccctgttcttcaccatctttgatgagaccaagagctggtacttcactgagaacatggagaggaactgcagggccccctgcaacatccagatggaggaccccaccttcaaggagaactacaggttccatgccatcaatggctacatcatggacaccctgcctggcctggtgatggcccaggaccagaggatcaggtggtacctgctgagcatggggagcaatgagaacatccacagcatccacttctctggccatgtgttcacagtgaggaagaaggaggagtacaagatggccctgtacaacctgtaccctggggtgtttgagacagtggagatgctgccctccaaggctggaatctggagggtggagtgcctgattggggagcacctgcatgctggcatgagcaccctgttcctggtgtacagcaacaagtgccagacccccctgggcatggcctctggccacatcagagacttccagatcacagcctcaggccagtatggccagtgggcccccaagctggccaggctgcactactctggcagcatcaatgcctggtccaccaaggagcccttcagctggatcaaggtggacctcctggcccccatgatcatccatggcatcaagacccagggggccaggcagaagttcagctccctgtacatctcccagttcatcatcatgtactccctggatggcaagaagtggcagacctacagaggcaacagcacaggcaccctgatggtgttctttggcaatgtggacagctctgggatcaagcacaacatcttcaacccccccatcattgccaggtacatcagactgcaccccacccactactccatcaggtccaccctgagaatggagctgatgggctgtgacctgaacagctgcagcatgcccctgggcatggagagcaaggccatctctgatgcccagatcacagccagcagctacttcaccaacatgtttgccacctggtcccccagcaaggccaggctgcacctgcagggcaggagcaatgcctggaggccccaggtgaacaaccccaaggagtggctgcaggtggacttccagaagaccatgaaggtgacaggggtgaccacccagggggtgaagtccctgctgaccagcatgtatgtgaaggagttcctgatcagcagctcccaggatggccaccagtggaccctgttcttccagaatggcaaggtgaaggtgttccagggcaaccaggacagcttcacccctgtggtgaactccctggacccccccctgctgaccagatacctgaggatccacccccagtcctgggtgcaccagattgccctgagaatggaggtgctgggctgtgaggcccaggacctgtactgattaattaagagcatcttaccgccatttattcccatatttgttctgtttttcttgatttgggtatacatttaaatgttaataaaacaaaatggtggggcaatcatttacatttttagggatatgtaattactagttcaggtgtattgccacaagacaaacatgttaagaaactttcccgttatttacgctctgttcctgttaatcaacctctggattacaaaatttgtgaaagattgactgatattcttaactatgttgctccttttacgctgtgtggatatgctgctttatagcctctgtatctagctattgcttcccgtacggctttcgttttctcctccttgtataaatcctggttgctgtctcttttagaggagttgtggcccgttgtccgtcaacgtggcgtggtgtgctctgtgtttgctgacgcaacccccactggctggggcattgccaccacctgtcaactcctttctgggactttcgctttccccctcccgatcgccacggcagaactcatcgccgcctgccttgcccgctgctggacaggggctaggttgctgggcactgataattccgtggtgttgtctgtgccttctagttgccagccatctgttgtttgcccctcccccgtgccttccttgaccctggaaggtgccactcccactgtcctttcctaataaaatgaggaaattgcatcgcattgtctgagtaggtgtcattctattctggggggtggggtggggcaggacagcaagggggaggattgggaagacaatagcaggcatgctggggatgcggtgggctctatggctctagagcatggctacgtagataagtagcatggcgggttaatcattaactacacctgcaggaggaacccctagtgatggagttggccactccctctctgcgcgctcgctcgctcactgaggccgggcgaccaaaggtcgcccgacgcccgggcggcctcagtgagcgagcgagcgcgcagctgcctgcagg

SEQ ID NO: 47 - DNA, 6250 bp, Artificial Sequence
  Description of Artificial Sequence: Synthetic polynucleotide
cctgcaggcagctgcgcgctcgctcgctcactgaggccgcccgggcaaagcccgggcgtcgggcgacctttggtcgcccggcctcagtgagcgagcgagcgcgcagagagggagtggccaactccatcactaggggttccttgtagttaatgattaacccgccatgctacttatcgcggccgcgggggaggctgctggtgaatattaaccaaggtcaccccagttatcggaggagcaaacaggggctaagtccaccgggggaggctgctggtgaatattaaccaaggtcaccccagttatcggaggagcaaacaggggctaagtccaccgggggaggctgctggtgaatattaaccaaggtcaccccagttatcggaggagcaaacaggggctaagtccacggtacccactgggaggatgttgagtaagatggaaaactactgatgacccttgcagagacagagtattaggacatgtttgaacaggggccgggcgatcagcaggtagcactagaggatccccgtctgtctgcacatttcgtagagcgagtgttccgatactctaatctccctaggcaaggttcatatttgtgtaggttacttattctccttttgttgactaagtcaataatcagaatcagcaggtttggagtcagcttggcagggatcagcagcctgggttggaaggagggggtataaaagccccttcaccaggagaagccgtcacacagatccacaagctcctgaagaggtaagggtttaagggatggttggttggtggggtattaatgtttaattacctggagcacctgcctgaaatcactttttttcaggttggtttaaacgccgccaccatgcagattgagctgagcacctgcttcttcctgtgcctgctgaggttctgcttctctgccaccaggagatactacctgggggctgtggagctgagctgggactacatgcagtctgacctgggggagctgcctgtggatgccaggttcccccccagagtgcccaagagcttccccttcaacacctctgtggtgtacaagaagaccctgtttgtggagttcactgaccacctgttcaacattgccaagcccaggcccccctggatgggcctgctgggccccaccatccaggctgaggtgtatgacactgtggtgatcaccctgaagaacatggccagccaccctgtgagcctgcatgctgtgggggtgagctactggaaggcctctgagggggctgagtatgatgaccagaccagccagagggagaaggaggatgacaaggtgttccctgggggcagccacacctatgtgtggcaggtgctgaaggagaatggccccatggcctctgaccccctgtgcctgacctacagctacctgagccatgtggacctggtgaaggacctgaactctggcctgattggggccctgctggtgtgcagggagggcagcctggccaaggagaagacccagaccctgcacaagttcatcctgctgtttgctgtgtttgatgagggcaagagctggcactctgaaaccaagaacagcctgatgcaggacagggatgctgcctctgccagggcctggcccaagatgcacactgtgaatggctatgtgaacaggagcctgcctggcctgattggctgccacaggaagtctgtgtactggcatgtgattggcatgggcaccacccctgaggtgcacagcatcttcctggagggccacaccttcctggtcaggaaccacaggcaggccagcctggagatcagccccatcaccttcctgactgcccagaccctgctgatggacctgggccagttcctgctgttctgccacatcagcagccaccagcatgatggcatggaggcctatgtgaaggtggacagctgccctgaggagccccagctgaggatgaagaacaatgaggaggctgaggactatgatgatgacctgactgactctgagatggatgtggtgaggtttgatgatgacaacagccccagcttcatccagatcaggtctgtggccaagaagcaccccaagacctgggtgcactacattgctgctgaggaggaggactgggactatgcccccctggtgctggcccctgatgacaggagctacaagagccagtacctgaacaatggcccccagaggattggcaggaagtacaagaaggtcaggttcatggcctacactgatgaaaccttcaagaccagggaggccatccagcatgagtctggcatcctgggccccctgctgtatggggaggtgggggacaccctgctgatcatcttcaagaaccaggccagcaggccctacaacatctacccccatggcatcactgatgtgaggcccctgtacagcaggaggctgcccaagggggtgaagcacctgaaggacttccccatcctgcctggggagatcttcaagtacaagtggactgtgactgtggaggatggccccaccaagtctgaccccaggtgcctgaccagatactacagcagctttgtgaacatggagagggacctggcctctggcctgattggccccctgctgatctgctacaaggagtctgtggaccagaggggcaaccagatcatgtctgacaagaggaatgtgatcctgttctctgtgtttgatgagaacaggagctggtacctgactgagaacatccagaggttcctgcccaaccctgctggggtgcagctggaggaccctgagttccaggccagcaacatcatgcacagcatcaatggctatgtgtttgacagcctgcagctgtctgtgtgcctgcatgaggtggcctactggtacatcctgagcattggggcccagactgacttcctgtctgtgttcttctctggctacaccttcaagcacaagatggtgtatgaggacaccctgaccctgttccccttctctggggagactgtgttcatgagcatggagaaccctggcctgtggattctgggctgccacaactctgacttcaggaacaggggcatgactgccctgctgaaagtctccagctgtgacaagaacactggggactactatgaggacagctatgaggacatctctgcctacctgctgagcaagaacaatgccattgagcccaggagcttcagccagaatagcaggcaccccagcaccaggcagaagcagttcaatgccaccaccatcccagagaataccaccctgcagtctgaccaggaggagattgactatgatgacaccatctctgtggagatgaagaaggaggactttgacatctacgacgaggacgagaaccagagccccaggagcttccagaagaagaccaggcactacttcattgctgctgtggagaggctgtgggactatggcatgagcagcagcccccatgtgctgaggaacagggcccagtctggctctgtgccccagttcaagaaggtggtgttccaggagttcactgatggcagcttcacccagcccctgtacagaggggagctgaatgagcacctgggcctgctgggcccctacatcagggctgaggtggaggacaacatcatggtgaccttcaggaaccaggccagcaggccctacagcttctacagcagcctgatcagctatgaggaggaccagaggcagggggctgagcccaggaagaactttgtgaagcccaatgaaaccaagacctacttctggaaggtgcagcaccacatggcccccaccaaggatgagtttgactgcaaggcctgggcctacttctctgatgtggacctggagaaggatgtgcactctggcctgattggccccctgctggtgtgccacaccaacaccctgaaccctgcccatggcaggcaggtgactgtgcaggagtttgccctgttcttcaccatctttgatgaaaccaagagctggtacttcactgagaacatggagaggaactgcagggccccctgcaacatccagatggaggaccccaccttcaaggagaactacaggttccatgccatcaatggctacatcatggacaccctgcctggcctggtgatggcccaggaccagaggatcaggtggtacctgctgagcatgggcagcaatgagaacatccacagcatccacttctctggccatgtgttcactgtgaggaagaaggaggagtacaagatggccctgtacaacctgtaccctggggtgtttgagactgtggagatgctgcccagcaaggctggcatctggagggtggagtgcctgattggggagcacctgcatgctggcatgagcaccctgttcctggtgtacagcaacaagtgccagacccccctgggcatggcctctggccacatcagggacttccagatcactgcctctggccagtatggccagtgggcccccaagctggccaggctgcactactctggcagcatcaatgcctggagcaccaaggagcccttcagctggatcaaggtggacctgctggcccccatgatcatccatggcatcaagacccagggggccaggcagaagttcagcagcctgtacatcagccagttcatcatcatgtacagcctggatggcaagaagtggcagacctacaggggcaacagcactggcaccctgatggtgttctttggcaatgtggacagctctggcatcaagcacaacatcttcaacccccccatcattgccagatacatcaggctgcaccccacccactacagcatcaggagcaccctgaggatggagctgatgggctgtgacctgaacagctgcagcatgcccctgggcatggagagcaaggccatctctgatgcccagatcactgccagcagctacttcaccaacatgtttgccacctggagccccagcaaggccaggctgcacctgcagggcaggagcaatgcctggaggccccaggtcaacaaccccaaggagtggctgcaggtggacttccagaagaccatgaaggtgactggggtgaccacccagggggtgaagagcctgctgaccagcatgtatgtgaaggagttcctgatcagcagcagccaggatggccaccagtggaccctgttcttccagaatggcaaggtgaaggtgttccagggcaaccaggacagcttcacccctgtggtgaacagcctggacccccccctgctgaccagatacctgaggattcacccccagagctgggtgcaccagattgccctgaggatggaggtgctgggctgtgaggcccaggacctgtactgattaattaagagcatcttaccgccatttattcccatatttgttctgtttttcttgatttgggtatacatttaaatgttaataaaacaaaatggtggggcaatcatttacatttttagggatatgtaattactagttcaggtgtattgccacaagacaaacatgttaagaaactttcccgttatttacgctctgttcctgttaatcaacctctggattacaaaatttgtgaaagattgactgatattcttaactatgttgctccttttacgctgtgtggatatgctgctttatagcctctgtatctagctattgcttcccgtacggctttcgttttctcctccttgtataaatcctggttgctgtctcttttagaggagttgtggcccgttgtccgtcaacgtggcgtggtgtgctctgtgtttgctgacgcaacccccactggctggggcattgccaccacctgtcaactcctttctgggactttcgctttccccctcccgatcgccacggcagaactcatcgccgcctgccttgcccgctgctggacaggggctaggttgctgggcactgataattccgtggtgttgtctgtgccttctagttgccagccatctgttgtttgcccctcccccgtgccttccttgaccctggaaggtgccactcccactgtcctttcctaataaaatgaggaaattgcatcgcattgtctgagtaggtgtcattctattctggggggtggggtggggcaggacagcaagggggaggattgggaagacaatagcaggcatgctggggatgcggtgggctctatggctctagagcatggctacgtagataagtagcatggcgggttaatcattaactacacctgcaggaggaacccctagtgatggagttggccactccctctctgcgcgctcgctcgctcactgaggccgggcgaccaaaggtcgcccgacgcccgggcggcctcagtgagcgagcgagcgcgcagctgcctgcagg

SEQ ID NO: 48 - DNA, 6055 bp, Artificial Sequence
  Description of Artificial Sequence: Synthetic polynucleotide
cctgcaggcagctgcgcgctcgctcgctcactgaggccgcccgggcaaagcccgggcgtcgggcgacctttggtcgcccggcctcagtgagcgagcgagcgcgcagagagggagtggccaactccatcactaggggttccttgtagttaatgattaacccgccatgctacttatctacgtagccatgctctagacgggggaggctgctggtgaatattaaccaaggtcaccccagttatcggaggagcaaacaggggctaagtccacacgcgtggtaccgtctgtctgcacatttcgtagagcgagtgttccgatactctaatctccctaggcaaggttcatatttgtgtaggttacttattctccttttgttgactaagtcaataatcagaatcagcaggtttggagtcagcttggcagggatcagcagcctgggttggaaggagggggtataaaagccccttcaccaggagaagccgtcacacagatccacaagctcctgaagaggttggtttaaacgccgccaccatgcaaattgagttatccacctgtttcttcctctgtctcctgaggttctgcttctctgccaccaggagatactacctgggggctgtggagctgtcctgggactacatgcagtcagacctgggggagctgccagttgatgccaggttggtatcaaggttacaagacaggtttaaggagaccaatagaaactgggcatgtggagacagagaagactcttgggtttctgataggcactgactctctctgcctattggtctattttcccacccttaggttcccccccagagtccccaagtccttccccttcaacacctcagtggtgtacaaaaagaccctgtttgtggagttcacagaccacctgttcaacatagccaagcccaggcccccctggatgggcctgctgggccccaccatccaggcagaggtttatgacacagtggtcatcaccctgaagaacatggcctcccaccctgtgtccctccatgctgtgggggtgagctactggaaggccagtgagggggcagaatatgatgaccagaccagccagagggagaaggaggatgacaaggtgttcccagggggcagccacacctatgtgtggcaggtcctgaaggagaatggccccatggcctctgaccccctctgcctcacctactcctacctgtcccatgtggacctggtgaaggacctcaactctggcctgattggagccctcctggtgtgcagggaggggagcctggccaaggaaaagacccagaccctgcacaagtttatcctgctctttgcagtctttgatgaggggaagtcctggcacagtgagaccaagaactccctgatgcaggacagagatgctgcctcagccagggcctggcccaagatgcacacagtgaatgggtatgtcaacaggagcctgccaggcctgattgggtgccacagaaagtcagtgtactggcatgtcattggcatgggcaccaccccagaggtgcactccatcttcctggagggccacaccttcctggtgaggaaccacagacaggccagcctggagatcagcccaatcaccttcctcacagcccagaccctcctcatggacctgggccagtttctcctgagctgccacatctcctcccaccagcatgatggcatggaggcctatgtgaaggtggacagctgccctgaggagccccagctcaggatgaagaacaatgaggaggcagaggactatgatgatgatctgacagactctgagatggatgtggtgagatttgatgatgacaacagcccctccttcatccagatcaggtctgtggccaagaagcaccctaagacctgggtgcactacattgcagctgaggaggaggactgggactatgcccccctggtcctggcccctgatgataggtcctacaagtcccagtacctgaacaatggcccccagaggatagggagaaagtacaagaaggtgaggttcatggcctacactgatgagaccttcaagactagggaagccatccagcatgagtctgggatcctgggccccctcctctatggggaggtgggggacaccctgctgatcatcttcaagaaccaggccagcaggccctacaacatttacccccatgggatcacagatgtgagacccctgtacagcaggagactgccaaagggggtgaagcacctgaaggacttccccatcctgccaggggagatcttcaagtacaagtggactgtgacagtggaggatgggcccaccaaatctgaccctagatgcctgaccagatactacagcagctttgtgaacatggagagggacctggcctctggactgattggccctctgctgatctgctacaaggagagtgtggaccagaggggaaaccagatcatgtctgacaagaggaatgtgatcctgttctcagtgtttgatgagaacagatcctggtacctcactgagaacatccagaggttcctgcccaacccagcaggggtgcagctggaggacccagagttccaggcctccaacatcatgcactccatcaatggctatgtctttgactccctgcagctgtcagtgtgcctgcatgaggtggcctactggtacatcctctccattggagcccagactgacttcctgtcagtcttcttcagtggctacaccttcaagcacaagatggtctatgaggacactctgaccctgttccccttctctggggagactgtgttcatgtccatggagaaccctggactgtggatcctgggctgccacaacagtgacttcaggaacaggggcatgactgccctgctgaaggtctccagctgtgacaagaacactggggactactatgaggactcctatgaggacatctctgcctacctgctgtccaagaacaatgccattgagcccaggtccttctcccagaacagcagacacccctccaccaggcagaagcagttcaatgcaaccaccatccctgaaaataccaccctgcagagtgaccaggaggagattgactatgatgacaccatctctgtggagatgaagaaggaggactttgacatctatgatgaggatgagaaccagagccctagaagcttccagaagaagaccagacactacttcattgctgcagtggaaagactgtgggactatgggatgagctcctccccccatgtgctgaggaacagggcccagtctggctctgtgccccagttcaagaaggtggtgttccaggagttcactgatggctccttcacccagcccctgtacaggggagagctgaatgagcacctgggcctgctgggcccctacatcagggctgaggtggaggacaatatcatggtgaccttcagaaaccaggcctccagaccttactccttctacagcagcctgatctcctatgaggaggaccagagacagggggctgagcccaggaagaactttgtgaagcccaatgagaccaagacctacttctggaaggtgcagcaccacatggcccccaccaaggatgagtttgactgcaaggcctgggcctacttctctgatgtggacctggagaaggatgtgcactctggcctgattggccccctgctggtgtgccacaccaacaccctgaaccctgcccatggcaggcaggtgactgtgcaggagtttgccctgttcttcaccatctttgatgagaccaagagctggtacttcactgagaacatggagaggaactgcagggccccctgcaacatccagatggaggaccccaccttcaaggagaactacaggttccatgccatcaatggctacatcatggacaccctgcctggcctggtgatggcccaggaccagaggatcaggtggtacctgctgagcatggggagcaatgagaacatccacagcatccacttctctggccatgtgttcacagtgaggaagaaggaggagtacaagatggccctgtacaacctgtaccctggggtgtttgagacagtggagatgctgccctccaaggctggaatctggagggtggagtgcctgattggggagcacctgcatgctggcatgagcaccctgttcctggtgtacagcaacaagtgccagacccccctgggcatggcctctggccacatcagagacttccagatcacagcctcaggccagtatggccagtgggcccccaagctggccaggctgcactactctggcagcatcaatgcctggtccaccaaggagcccttcagctggatcaaggtggacctcctggcccccatgatcatccatggcatcaagacccagggggccaggcagaagttcagctccctgtacatctcccagttcatcatcatgtactccctggatggcaagaagtggcagacctacagaggcaacagcacaggcaccctgatggtgttctttggcaatgtggacagctctgggatcaagcacaacatcttcaacccccccatcattgccaggtacatcagactgcaccccacccactactccatcaggtccaccctgagaatggagctgatgggctgtgacctgaacagctgcagcatgcccctgggcatggagagcaaggccatctctgatgcccagatcacagccagcagctacttcaccaacatgtttgccacctggtcccccagcaaggccaggctgcacctgcagggcaggagcaatgcctggaggccccaggtgaacaaccccaaggagtggctgcaggtggacttccagaagaccatgaaggtgacaggggtgaccacccagggggtgaagtccctgctgaccagcatgtatgtgaaggagttcctgatcagcagctcccaggatggccaccagtggaccctgttcttccagaatggcaaggtgaaggtgttccagggcaaccaggacagcttcacccctgtggtgaactccctggacccccccctgctgaccagatacctgaggatccacccccagtcctgggtgcaccagattgccctgagaatggaggtgctgggctgtgaggcccaggacctgtactgattaattaagagcatcttaccgccatttattcccatatttgttctgtttttcttgatttgggtatacatttaaatgttaataaaacaaaatggtggggcaatcatttacatttttagggatatgtaattactagttcaggtgtattgccacaagacaaacatgttaagaaactttcccgttatttacgctctgttcctgttaatcaacctctggattacaaaatttgtgaaagattgactgatattcttaactatgttgctccttttacgctgtgtggatatgctgctttatagcctctgtatctagctattgcttcccgtacggctttcgttttctcctccttgtataaatcctggttgctgtctcttttagaggagttgtggcccgttgtccgtcaacgtggcgtggtgtgctctgtgtttgctgacgcaacccccactggctggggcattgccaccacctgtcaactcctttctgggactttcgctttccccctcccgatcgccacggcagaactcatcgccgcctgccttgcccgctgctggacaggggctaggttgctgggcactgataattccgtggtgttgtctgtgccttctagttgccagccatctgttgtttgcccctcccccgtgccttccttgaccctggaaggtgccactcccactgtcctttcctaataaaatgaggaaattgcatcgcattgtctgagtaggtgtcattctattctggggggtggggtggggcaggacagcaagggggaggattgggaagacaatagcaggcatgctggggatgcggtgggctctatggctctagagcatggctacgtagataagtagcatggcgggttaatcattaactacacctgcaggaggaacccctagtgatggagttggccactccctctctgcgcgctcgctcgctcactgaggccgggcgaccaaaggtcgcccgacgcccgggcggcctcagtgagcgagcgagcgcgcagctgcctgcagg

SEQ ID NO: 49 - DNA, 6157 bp, Artificial Sequence
  Description of Artificial Sequence: Synthetic polynucleotide
cctgcaggcagctgcgcgctcgctcgctcactgaggccgcccgggcaaagcccgggcgtcgggcgacctttggtcgcccggcctcagtgagcgagcgagcgcgcagagagggagtggccaactccatcactaggggttccttgtagttaatgattaacccgccatgctacttatctacgtagccatgctctagacgggggaggctgctggtgaatattaaccaaggtcaccccagttatcggaggagcaaacaggggctaagtccacacgcgtggtaccgtctgtctgcacatttcgtagagcgagtgttccgatactctaatctccctaggcaaggttcatatttgtgtaggttacttattctccttttgttgactaagtcaataatcagaatcagcaggtttggagtcagcttggcagggatcagcagcctgggttggaaggagggggtataaaagccccttcaccaggagaagccgtcacacagatccacaagctcctgaagaggtaagggtttaagggatggttggttggtggggtattaatgtttaattacctggagcacctgcctgaaatcactttttttcaggttggtttaaacgccgccaccatgcaaattgagttatccacctgtttcttcctctgtctcctgaggttctgcttctctgccaccaggagatactacctgggggctgtggagctgtcctgggactacatgcaaagtgatctgggtgagctgcctgtggatgcaaggtaaaggcatgtcctgtagggtctgatcggggccaggattgtggggatgtctccttgctaatagtagaaaagagtagtatggaagcattacttccagctgctttttgaagtgtccaccaaaatgaacgactttttcctttcttcacgcagatttcctcctagagtgccaaaatcttttccattcaacacctcagtggtgtacaaaaagaccctgtttgtggagttcacagaccacctgttcaacatagccaagcccaggcccccctggatgggcctgctgggccccaccatccaggcagaggtttatgacacagtggtcatcaccctgaagaacatggcctcccaccctgtgtccctccatgctgtgggggtgagctactggaaggccagtgagggggcagaatatgatgaccagaccagccagagggagaaggaggatgacaaggtgttcccagggggcagccacacctatgtgtggcaggtcctgaaggagaatggccccatggcctctgaccccctctgcctcacctactcctacctgtcccatgtggacctggtgaaggacctcaactctggcctgattggagccctcctggtgtgcagggaggggagcctggccaaggaaaagacccagaccctgcacaagtttatcctgctctttgcagtctttgatgaggggaagtcctggcacagtgagaccaagaactccctgatgcaggacagagatgctgcctcagccagggcctggcccaagatgcacacagtgaatgggtatgtcaacaggagcctgccaggcctgattgggtgccacagaaagtcagtgtactggcatgtcattggcatgggcaccaccccagaggtgcactccatcttcctggagggccacaccttcctggtgaggaaccacagacaggccagcctggagatcagcccaatcaccttcctcacagcccagaccctcctcatggacctgggccagtttctcctgagctgccacatctcctcccaccagcatgatggcatggaggcctatgtgaaggtggacagctgccctgaggagccccagctcaggatgaagaacaatgaggaggcagaggactatgatgatgatctgacagactctgagatggatgtggtgagatttgatgatgacaacagcccctccttcatccagatcaggtctgtggccaagaagcaccctaagacctgggtgcactacattgcagctgaggaggaggactgggactatgcccccctggtcctggcccctgatgataggtcctacaagtcccagtacctgaacaatggcccccagaggatagggagaaagtacaagaaggtgaggttcatggcctacactgatgagaccttcaagactagggaagccatccagcatgagtctgggatcctgggccccctcctctatggggaggtgggggacaccctgctgatcatcttcaagaaccaggccagcaggccctacaacatttacccccatgggatcacagatgtgagacccctgtacagcaggagactgccaaagggggtgaagcacctgaaggacttccccatcctgccaggggagatcttcaagtacaagtggactgtgacagtggaggatgggcccaccaaatctgaccctagatgcctgaccagatactacagcagctttgtgaacatggagagggacctggcctctggactgattggccctctgctgatctgctacaaggagagtgtggaccagaggggaaaccagatcatgtctgacaagaggaatgtgatcctgttctcagtgtttgatgagaacagatcctggtacctcactgagaacatccagaggttcctgcccaacccagcaggggtgcagctggaggacccagagttccaggcctccaacatcatgcactccatcaatggctatgtctttgactccctgcagctgtcagtgtgcctgcatgaggtggcctactggtacatcctctccattggagcccagactgacttcctgtcagtcttcttcagtggctacaccttcaagcacaagatggtctatgaggacactctgaccctgttccccttctctggggagactgtgttcatgtccatggagaaccctggactgtggatcctgggctgccacaacagtgacttcaggaacaggggcatgactgccctgctgaaggtctccagctgtgacaagaacactggggactactatgaggactcctatgaggacatctctgcctacctgctgtccaagaacaatgccattgagcccaggtccttctcccagaacagcagacacccctccaccaggcagaagcagttcaatgcaaccaccatccctgaaaataccaccctgcagagtgaccaggaggagattgactatgatgacaccatctctgtggagatgaagaaggaggactttgacatctatgatgaggatgagaaccagagccctagaagcttccagaagaagaccagacactacttcattgctgcagtggaaagactgtgggactatgggatgagctcctccccccatgtgctgaggaacagggcccagtctggctctgtgccccagttcaagaaggtggtgttccaggagttcactgatggctccttcacccagcccctgtacaggggagagctgaatgagcacctgggcctgctgggcccctacatcagggctgaggtggaggacaatatcatggtgaccttcagaaaccaggcctccagaccttactccttctacagcagcctgatctcctatgaggaggaccagagacagggggctgagcccaggaagaactttgtgaagcccaatgagaccaagacctacttctggaaggtgcagcaccacatggcccccaccaaggatgagtttgactgcaaggcctgggcctacttctctgatgtggacctggagaaggatgtgcactctggcctgattggccccctgctggtgtgccacaccaacaccctgaaccctgcccatggcaggcaggtgactgtgcaggagtttgccctgttcttcaccatctttgatgagaccaagagctggtacttcactgagaacatggagaggaactgcagggccccctgcaacatccagatggaggaccccaccttcaaggagaactacaggttccatgccatcaatggctacatcatggacaccctgcctggcctggtgatggcccaggaccagaggatcaggtggtacctgctgagcatggggagcaatgagaacatccacagcatccacttctctggccatgtgttcacagtgaggaagaaggaggagtacaagatggccctgtacaacctgtaccctggggtgtttgagacagtggagatgctgccctccaaggctggaatctggagggtggagtgcctgattggggagcacctgcatgctggcatgagcaccctgttcctggtgtacagcaacaagtgccagacccccctgggcatggcctctggccacatcagagacttccagatcacagcctcaggccagtatggccagtgggcccccaagctggccaggctgcactactctggcagcatcaatgcctggtccaccaaggagcccttcagctggatcaaggtggacctcctggcccccatgatcatccatggcatcaagacccagggggccaggcagaagttcagctccctgtacatctcccagttcatcatcatgtactccctggatggcaagaagtggcagacctacagaggcaacagcacaggcaccctgatggtgttctttggcaatgtggacagctctgggatcaagcacaacatcttcaacccccccatcattgccaggtacatcagactgcaccccacccactactccatcaggtccaccctgagaatggagctgatgggctgtgacctgaacagctgcagcatgcccctgggcatggagagcaaggccatctctgatgcccagatcacagccagcagctacttcaccaacatgtttgccacctggtcccccagcaaggccaggctgcacctgcagggcaggagcaatgcctggaggccccaggtgaacaaccccaaggagtggctgcaggtggacttccagaagaccatgaaggtgacaggggtgaccacccagggggtgaagtccctgctgaccagcatgtatgtgaaggagttcctgatcagcagctcccaggatggccaccagtggaccctgttcttccagaatggcaaggtgaaggtgttccagggcaaccaggacagcttcacccctgtggtgaactccctggacccccccctgctgaccagatacctgaggatccacccccagtcctgggtgcaccagattgccctgagaatggaggtgctgggctgtgaggcccaggacctgtactgattaattaagagcatcttaccgccatttattcccatatttgttctgtttttcttgatttgggtatacatttaaatgttaataaaacaaaatggtggggcaatcatttacatttttagggatatgtaattactagttcaggtgtattgccacaagacaaacatgttaagaaactttcccgttatttacgctctgttcctgttaatcaacctctggattacaaaatttgtgaaagattgactgatattcttaactatgttgctccttttacgctgtgtggatatgctgctttatagcctctgtatctagctattgcttcccgtacggctttcgttttctcctccttgtataaatcctggttgctgtctcttttagaggagttgtggcccgttgtccgtcaacgtggcgtggtgtgctctgtgtttgctgacgcaacccccactggctggggcattgccaccacctgtcaactcctttctgggactttcgctttccccctcccgatcgccacggcagaactcatcgccgcctgccttgcccgctgctggacaggggctaggttgctgggcactgataattccgtggtgttgtctgtgccttctagttgccagccatctgttgtttgcccctcccccgtgccttccttgaccctggaaggtgccactcccactgtcctttcctaataaaatgaggaaattgcatcgcattgtctgagtaggtgtcattctattctggggggtggggtggggcaggacagcaagggggaggattgggaagacaatagcaggcatgctggggatgcggtgggctctatggctctagagcatggctacgtagataagtagcatggcgggttaatcattaactacacctgcaggaggaacccctagtgatggagttggccactccctctctgcgcgctcgctcgctcactgaggccgggcgaccaaaggtcgcccgacgcccgggcggcctcagtgagcgagcgagcgcgcagctgcctgcagg

SEQ ID NO: 50 - DNA, 6407 bp, Artificial Sequence
  Description of Artificial Sequence: Synthetic polynucleotide
cctgcaggcagctgcgcgctcgctcgctcactgaggccgcccgggcaaagcccgggcgtcgggcgacctttggtcgcccggcctcagtgagcgagcgagcgcgcagagagggagtggccaactccatcactaggggttccttgtagttaatgattaacccgccatgctacttatctacgtagccatgctctagacgggggaggctgctggtgaatattaaccaaggtcaccccagttatcggaggagcaaacaggggctaagtccacacgcgtggtaccgtctgtctgcacatttcgtagagcgagtgttccgatactctaatctccctaggcaaggttcatatttgtgtaggttacttattctccttttgttgactaagtcaataatcagaatcagcaggtttggagtcagcttggcagggatcagcagcctgggttggaaggagggggtataaaagccccttcaccaggagaagccgtcacacagatccacaagctcctgaagaggtaagggtttaagggatggttggttggtggggtattaatgtttaattacctggagcacctgcctgaaatcactttttttcaggttggtttaaacgccgccaccatgcaaattgagttatccacctgtttcttcctctgtctcctgaggttctgcttctctgccaccaggagatactacctgggggctgtggagctgtcctgggactacatgcaaagtgatctgggtgagctgcctgtggatgcaaggtaaaggcatgtcctgtagggtctgatcggggccaggattgtggggatgtaagtctgcttggaggaaggtgcagacatcgggttaggatggttgtgatgctacctgggccccaaagaaacatttctgggtaaggtgtgcacacatctgtgttattagcagaaatgctaactgccaattcttttcataggtctgacctatttatgattcttatcatatggcacctaatgtatcagttgagttgtgaaaacagtgtttcggtttaatggatgttagggatttatatacaacttcaaatttgcctccttgctaatagtagaaaagagtagtatggaagcattacttccagctgctttttgaagtgtccaccaaaatgaacgactttttcctttcttcacgcagatttcctcctagagtgccaaaatcttttccattcaacacctcagtggtgtacaaaaagaccctgtttgtggagttcacagaccacctgttcaacatagccaagcccaggcccccctggatgggcctgctgggccccaccatccaggcagaggtttatgacacagtggtcatcaccctgaagaacatggcctcccaccctgtgtccctccatgctgtgggggtgagctactggaaggccagtgagggggcagaatatgatgaccagaccagccagagggagaaggaggatgacaaggtgttcccagggggcagccacacctatgtgtggcaggtcctgaaggagaatggccccatggcctctgaccccctctgcctcacctactcctacctgtcccatgtggacctggtgaaggacctcaactctggcctgattggagccctcctggtgtgcagggaggggagcctggccaaggaaaagacccagaccctgcacaagtttatcctgctctttgcagtctttgatgaggggaagtcctggcacagtgagaccaagaactccctgatgcaggacagagatgctgcctcagccagggcctggcccaagatgcacacagtgaatgggtatgtcaacaggagcctgccaggcctgattgggtgccacagaaagtcagtgtactggcatgtcattggcatgggcaccaccccagaggtgcactccatcttcctggagggccacaccttcctggtgaggaaccacagacaggccagcctggagatcagcccaatcaccttcctcacagcccagaccctcctcatggacctgggccagtttctcctgagctgccacatctcctcccaccagcatgatggcatggaggcctatgtgaaggtggacagctgccctgaggagccccagctcaggatgaagaacaatgaggaggcagaggactatgatgatgatctgacagactctgagatggatgtggtgagatttgatgatgacaacagcccctccttcatccagatcaggtctgtggccaagaagcaccctaagacctgggtgcactacattgcagctgaggaggaggactgggactatgcccccctggtcctggcccctgatgataggtcctacaagtcccagtacctgaacaatggcccccagaggatagggagaaagtacaagaaggtgaggttcatggcctacactgatgagaccttcaagactagggaagccatccagcatgagtctgggatcctgggccccctcctctatggggaggtgggggacaccctgctgatcatcttcaagaaccaggccagcaggccctacaacatttacccccatgggatcacagatgtgagacccctgtacagcaggagactgccaaagggggtgaagcacctgaaggacttccccatcctgccaggggagatcttcaagtacaagtggactgtgacagtggaggatgggcccaccaaatctgaccctagatgcctgaccagatactacagcagctttgtgaacatggagagggacctggcctctggactgattggccctctgctgatctgctacaaggagagtgtggaccagaggggaaaccagatcatgtctgacaagaggaatgtgatcctgttctcagtgtttgatgagaacagatcctggtacctcactgagaacatccagaggttcctgcccaacccagcaggggtgcagctggaggacccagagttccaggcctccaacatcatgcactccatcaatggctatgtctttgactccctgcagctgtcagtgtgcctgcatgaggtggcctactggtacatcctctccattggagcccagactgacttcctgtcagtcttcttcagtggctacaccttcaagcacaagatggtctatgaggacactctgaccctgttccccttctctggggagactgtgttcatgtccatggagaaccctggactgtggatcctgggctgccacaacagtgacttcaggaacaggggcatgactgccctgctgaaggtctccagctgtgacaagaacactggggactactatgaggactcctatgaggacatctctgcctacctgctgtccaagaacaatgccattgagcccaggtccttctcccagaacagcagacacccctccaccaggcagaagcagttcaatgcaaccaccatccctgaaaataccaccctgcagagtgaccaggaggagattgactatgatgacaccatctctgtggagatgaagaaggaggactttgacatctatgatgaggatgagaaccagagccctagaagcttccagaagaagaccagacactacttcattgctgcagtggaaagactgtgggactatgggatgagctcctccccccatgtgctgaggaacagggcccagtctggctctgtgccccagttcaagaaggtggtgttccaggagttcactgatggctccttcacccagcccctgtacaggggagagctgaatgagcacctgggcctgctgggcccctacatcagggctgaggtggaggacaatatcatggtgaccttcagaaaccaggcctccagaccttactccttctacagcagcctgatctcctatgaggaggaccagagacagggggctgagcccaggaagaactttgtgaagcccaatgagaccaagacctacttctggaaggtgcagcaccacatggcccccaccaaggatgagtttgactgcaaggcctgggcctacttctctgatgtggacctggagaaggatgtgcactctggcctgattggccccctgctggtgtgccacaccaacaccctgaaccctgcccatggcaggcaggtgactgtgcaggagtttgccctgttcttcaccatctttgatgagaccaagagctggtacttcactgagaacatggagaggaactgcagggccccctgcaacatccagatggaggaccccaccttcaaggagaactacaggttccatgccatcaatggctacatcatggacaccctgcctggcctggtgatggcccaggaccagaggatcaggtggtacctgctgagcatggggagcaatgagaacatccacagcatccacttctctggccatgtgttcacagtgaggaagaaggaggagtacaagatggccctgtacaacctgtaccctggggtgtttgagacagtggagatgctgccctccaaggctggaatctggagggtggagtgcctgattggggagcacctgcatgctggcatgagcaccctgttcctggtgtacagcaacaagtgccagacccccctgggcatggcctctggccacatcagagacttccagatcacagcctcaggccagtatggccagtgggcccccaagctggccaggctgcactactctggcagcatcaatgcctggtccaccaaggagcccttcagctggatcaaggtggacctcctggcccccatgatcatccatggcatcaagacccagggggccaggcagaagttcagctccctgtacatctcccagttcatcatcatgtactccctggatggcaagaagtggcagacctacagaggcaacagcacaggcaccctgatggtgttctttggcaatgtggacagctctgggatcaagcacaacatcttcaacccccccatcattgccaggtacatcagactgcaccccacccactactccatcaggtccaccctgagaatggagctgatgggctgtgacctgaacagctgcagcatgcccctgggcatggagagcaaggccatctctgatgcccagatcacagccagcagctacttcaccaacatgtttgccacctggtcccccagcaaggccaggctgcacctgcagggcaggagcaatgcctggaggccccaggtgaacaaccccaaggagtggctgcaggtggacttccagaagaccatgaaggtgacaggggtgaccacccagggggtgaagtccctgctgaccagcatgtatgtgaaggagttcctgatcagcagctcccaggatggccaccagtggaccctgttcttccagaatggcaaggtgaaggtgttccagggcaaccaggacagcttcacccctgtggtgaactccctggacccccccctgctgaccagatacctgaggatccacccccagtcctgggtgcaccagattgccctgagaatggaggtgctgggctgtgaggcccaggacctgtactgattaattaagagcatcttaccgccatttattcccatatttgttctgtttttcttgatttgggtatacatttaaatgttaataaaacaaaatggtggggcaatcatttacatttttagggatatgtaattactagttcaggtgtattgccacaagacaaacatgttaagaaactttcccgttatttacgctctgttcctgttaatcaacctctggattacaaaatttgtgaaagattgactgatattcttaactatgttgctccttttacgctgtgtggatatgctgctttatagcctctgtatctagctattgcttcccgtacggctttcgttttctcctccttgtataaatcctggttgctgtctcttttagaggagttgtggcccgttgtccgtcaacgtggcgtggtgtgctctgtgtttgctgacgcaacccccactggctggggcattgccaccacctgtcaactcctttctgggactttcgctttccccctcccgatcgccacggcagaactcatcgccgcctgccttgcccgctgctggacaggggctaggttgctgggcactgataattccgtggtgttgtctgtgccttctagttgccagccatctgttgtttgcccctcccccgtgccttccttgaccctggaaggtgccactcccactgtcctttcctaataaaatgaggaaattgcatcgcattgtctgagtaggtgtcattctattctggggggtggggtggggcaggacagcaagggggaggattgggaagacaatagcaggcatgctggggatgcggtgggctctatggctctagagcatggctacgtagataagtagcatggcgggttaatcattaactacacctgcaggaggaacccctagtgatggagttggccactccctctctgcgcgctcgctcgctcactgaggccgggcgaccaaaggtcgcccgacgcccgggcggcctcagtgagcgagcgagcgcgcagctgcctgcagg

SEQ ID NO: 51 - DNA, 7007 bp, Artificial Sequence
  Description of Artificial Sequence: Synthetic polynucleotide
cctgcaggcagctgcgcgctcgctcgctcactgaggccgcccgggcaaagcccgggcgtcgggcgacctttggtcgcccggcctcagtgagcgagcgagcgcgcagagagggagtggccaactccatcactaggggttccttgtagttaatgattaacccgccatgctacttatctacgtagccatgctctagacgggggaggctgctggtgaatattaaccaaggtcaccccagttatcggaggagcaaacaggggctaagtccacacgcgtggtaccgtctgtctgcacatttcgtagagcgagtgttccgatactctaatctccctaggcaaggttcatatttgtgtaggttacttattctccttttgttgactaagtcaataatcagaatcagcaggtttggagtcagcttggcagggatcagcagcctgggttggaaggagggggtataaaagccccttcaccaggagaagccgtcacacagatccacaagctcctgaagaggtaagggtttaagggatggttggttggtggggtattaatgtttaattacctggagcacctgcctgaaatcactttttttcaggttggtttaaacgccgccaccatgcagattgagctgagcacctgcttcttcctgtgcctgctgaggttctgcttctctgccaccaggagatactacctgggggctgtggagctgagctgggactacatgcagtctgacctgggggagctgcctgtggatgccaggtaaaggcatgtcctgtagggtctgatcggggccaggattgtggggatgtaagtctgcttggaggaaggtgcagacatcgggttaggatggttgtgatgctacctgggccccaaagaaacatttctgggtaaggtgtgcacacatctgtgttattagcagaaatgctaactgccaattcttttcataggtctgacctatttgttgatattttgttctgttttgtccattgcttctcttcgtcatatgctgctcctccagaatctagagactggagtagagggagggtgaagggacaaagacaaaacttccctctgcctgcccaagcttccatagagagaatcaaggcaatgaaatccaatcaatatcacacacaagtttcatgtctggttctcttgtgtgtacatgcaatgtgtgtttttataatatcttttcctactttgggtgtaaggataatatgagccttgagttcagaagcttttcgtgttttgggggttctggttgagtaattgggagtatctgagtggagacaagaatgaacattaatgtaggactgattctgaattacagcttctggcactagtaggtttcaatatacatagtctgctgaaaggtaattttctctgtgatattcctggtatccctaaggagggaagtataattttaggtacatactgacaaaatttgaacacaaggtacttagatgaaagttatagtctgttttagagatgaaattgaaggatgcagtagctattgctttggcaaaggatttttggctgatgcagtgtatggttattgattttatgattcttatcatatggcacctaatgtatcagttgagttgtgaaaacagtgtttcggtttaatggatgttagggatttatatacaacttcaaatttgcctccttgctaatagtagaaaagagtagtatggaagcattacttccagctgctttttgaagtgtccaccaaaatgaacgactttttcctttcttcacgcaggttcccccccagagtgcccaagagcttccccttcaacacctctgtggtgtacaagaagaccctgtttgtggagttcactgaccacctgttcaacattgccaagcccaggcccccctggatgggcctgctgggccccaccatccaggctgaggtgtatgacactgtggtgatcaccctgaagaacatggccagccaccctgtgagcctgcatgctgtgggggtgagctactggaaggcctctgagggggctgagtatgatgaccagaccagccagagggagaaggaggatgacaaggtgttccctgggggcagccacacctatgtgtggcaggtgctgaaggagaatggccccatggcctctgaccccctgtgcctgacctacagctacctgagccatgtggacctggtgaaggacctgaactctggcctgattggggccctgctggtgtgcagggagggcagcctggccaaggagaagacccagaccctgcacaagttcatcctgctgtttgctgtgtttgatgagggcaagagctggcactctgaaaccaagaacagcctgatgcaggacagggatgctgcctctgccagggcctggcccaagatgcacactgtgaatggctatgtgaacaggagcctgcctggcctgattggctgccacaggaagtctgtgtactggcatgtgattggcatgggcaccacccctgaggtgcacagcatcttcctggagggccacaccttcctggtcaggaaccacaggcaggccagcctggagatcagccccatcaccttcctgactgcccagaccctgctgatggacctgggccagttcctgctgagctgccacatcagcagccaccagcatgatggcatggaggcctatgtgaaggtggacagctgccctgaggagccccagctgaggatgaagaacaatgaggaggctgaggactatgatgatgacctgactgactctgagatggatgtggtgaggtttgatgatgacaacagccccagcttcatccagatcaggtctgtggccaagaagcaccccaagacctgggtgcactacattgctgctgaggaggaggactgggactatgcccccctggtgctggcccctgatgacaggagctacaagagccagtacctgaacaatggcccccagaggattggcaggaagtacaagaaggtcaggttcatggcctacactgatgaaaccttcaagaccagggaggccatccagcatgagtctggcatcctgggccccctgctgtatggggaggtgggggacaccctgctgatcatcttcaagaaccaggccagcaggccctacaacatctacccccatggcatcactgatgtgaggcccctgtacagcaggaggctgcccaagggggtgaagcacctgaaggacttccccatcctgcctggggagatcttcaagtacaagtggactgtgactgtggaggatggccccaccaagtctgaccccaggtgcctgaccagatactacagcagctttgtgaacatggagagggacctggcctctggcctgattggccccctgctgatctgctacaaggagtctgtggaccagaggggcaaccagatcatgtctgacaagaggaatgtgatcctgttctctgtgtttgatgagaacaggagctggtacctgactgagaacatccagaggttcctgcccaaccctgctggggtgcagctggaggaccctgagttccaggccagcaacatcatgcacagcatcaatggctatgtgtttgacagcctgcagctgtctgtgtgcctgcatgaggtggcctactggtacatcctgagcattggggcccagactgacttcctgtctgtgttcttctctggctacaccttcaagcacaagatggtgtatgaggacaccctgaccctgttccccttctctggggagactgtgttcatgagcatggagaaccctggcctgtggattctgggctgccacaactctgacttcaggaacaggggcatgactgccctgctgaaagtctccagctgtgacaagaacactggggactactatgaggacagctatgaggacatctctgcctacctgctgagcaagaacaatgccattgagcccaggagcttcagccagaatagcaggcaccccagcaccaggcagaagcagttcaatgccaccaccatcccagagaataccaccctgcagtctgaccaggaggagattgactatgatgacaccatctctgtggagatgaagaaggaggactttgacatctacgacgaggacgagaaccagagccccaggagcttccagaagaagaccaggcactacttcattgctgctgtggagaggctgtgggactatggcatgagcagcagcccccatgtgctgaggaacagggcccagtctggctctgtgccccagttcaagaaggtggtgttccaggagttcactgatggcagcttcacccagcccctgtacagaggggagctgaatgagcacctgggcctgctgggcccctacatcagggctgaggtggaggacaacatcatggtgaccttcaggaaccaggccagcaggccctacagcttctacagcagcctgatcagctatgaggaggaccagaggcagggggctgagcccaggaagaactttgtgaagcccaatgaaaccaagacctacttctggaaggtgcagcaccacatggcccccaccaaggatgagtttgactgcaaggcctgggcctacttctctgatgtggacctggagaaggatgtgcactctggcctgattggccccctgctggtgtgccacaccaacaccctgaaccctgcccatggcaggcaggtgactgtgcaggagtttgccctgttcttcaccatctttgatgaaaccaagagctggtacttcactgagaacatggagaggaactgcagggccccctgcaacatccagatggaggaccccaccttcaaggagaactacaggttccatgccatcaatggctacatcatggacaccctgcctggcctggtgatggcccaggaccagaggatcaggtggtacctgctgagcatgggcagcaatgagaacatccacagcatccacttctctggccatgtgttcactgtgaggaagaaggaggagtacaagatggccctgtacaacctgtaccctggggtgtttgagactgtggagatgctgcccagcaaggctggcatctggagggtggagtgcctgattggggagcacctgcatgctggcatgagcaccctgttcctggtgtacagcaacaagtgccagacccccctgggcatggcctctggccacatcagggacttccagatcactgcctctggccagtatggccagtgggcccccaagctggccaggctgcactactctggcagcatcaatgcctggagcaccaaggagcccttcagctggatcaaggtggacctgctggcccccatgatcatccatggcatcaagacccagggggccaggcagaagttcagcagcctgtacatcagccagttcatcatcatgtacagcctggatggcaagaagtggcagacctacaggggcaacagcactggcaccctgatggtgttctttggcaatgtggacagctctggcatcaagcacaacatcttcaacccccccatcattgccagatacatcaggctgcaccccacccactacagcatcaggagcaccctgaggatggagctgatgggctgtgacctgaacagctgcagcatgcccctgggcatggagagcaaggccatctctgatgcccagatcactgccagcagctacttcaccaacatgtttgccacctggagccccagcaaggccaggctgcacctgcagggcaggagcaatgcctggaggccccaggtcaacaaccccaaggagtggctgcaggtggacttccagaagaccatgaaggtgactggggtgaccacccagggggtgaagagcctgctgaccagcatgtatgtgaaggagttcctgatcagcagcagccaggatggccaccagtggaccctgttcttccagaatggcaaggtgaaggtgttccagggcaaccaggacagcttcacccctgtggtgaacagcctggacccccccctgctgaccagatacctgaggattcacccccagagctgggtgcaccagattgccctgaggatggaggtgctgggctgtgaggcccaggacctgtactgattaattaagagcatcttaccgccatttattcccatatttgttctgtttttcttgatttgggtatacatttaaatgttaataaaacaaaatggtggggcaatcatttacatttttagggatatgtaattactagttcaggtgtattgccacaagacaaacatgttaagaaactttcccgttatttacgctctgttcctgttaatcaacctctggattacaaaatttgtgaaagattgactgatattcttaactatgttgctccttttacgctgtgtggatatgctgctttatagcctctgtatctagctattgcttcccgtacggctttcgttttctcctccttgtataaatcctggttgctgtctcttttagaggagttgtggcccgttgtccgtcaacgtggcgtggtgtgctctgtgtttgctgacgcaacccccactggctggggcattgccaccacctgtcaactcctttctgggactttcgctttccccctcccgatcgccacggcagaactcatcgccgcctgccttgcccgctgctggacaggggctaggttgctgggcactgataattccgtggtgttgtctgtgccttctagttgccagccatctgttgtttgcccctcccccgtgccttccttgaccctggaaggtgccactcccactgtcctttcctaataaaatgaggaaattgcatcgcattgtctgagtaggtgtcattctattctggggggtggggtggggcaggacagcaagggggaggattgggaagacaatagcaggcatgctggggatgcggtgggctctatggctctagagcatggctacgtagataagtagcatggcgggttaatcattaactacacctgcaggaggaacccctagtgatggagttggccactccctctctgcgcgctcgctcgctcactgaggccgggcgaccaaaggtcgcccgacgcccgggcggcctcagtgagcgagcgagcgcgcagctgcctgcagg

SEQ ID NO: 52 - DNA, 6497 bp, Artificial Sequence
  Description of Artificial Sequence: Synthetic polynucleotide
cctgcaggcagctgcgcgctcgctcgctcactgaggccgcccgggcaaagcccgggcgtcgggcgacctttggtcgcccggcctcagtgagcgagcgagcgcgcagagagggagtggccaactccatcactaggggttccttgtagttaatgattaacccgccatgctacttatctacgtagccatgctctagacgggggaggctgctggtgaatattaaccaaggtcaccccagttatcggaggagcaaacaggggctaagtccacacgcgtggtaccgtctgtctgcacatttcgtagagcgagtgttccgatactctaatctccctaggcaaggttcatatttgtgtaggttacttattctccttttgttgactaagtcaataatcagaatcagcaggtttggagtcagcttggcagggatcagcagcctgggttggaaggagggggtataaaagccccttcaccaggagaagccgtcacacagatccacaagctcctgaagaggtaagggtttaagggatggttggttggtggggtattaatgtttaattacctggagcacctgcctgaaatcactttttttcaggttggtttaaacgccgccaccatgcagattgagctgagcacctgcttcttcctgtgcctgctgaggttctgcttctctgccaccaggagatactacctgggggctgtggagctgagctgggactacatgcagtctgacctgggggagctgcctgtggatgccaggtaaaggcatgtcctgtagggtctgatcggggccaggattgtggggatgtaagtctgcttggaggaaggtgcagacatcgggttaggatggttgtgatgctacctgggccccaaagaaacatttctgggtaaggtgtgcacacatctgtgttattagcagaaatgctaactgccaattcttttcataggtctgacctattgttaatcattaacgcttgtactttggtacagttaatcattaacgcttgtactttggtacagttaatcattaacgcttgtactttggtacatatgattcttatcatatggcacctaatgtatcagttgagttgtgaaaacagtgtttcggtttaatggatgttagggatttatatacaacttcaaatttgcctccttgctaatagtagaaaagagtagtatggaagcattacttccagctgctttttgaagtgtccaccaaaatgaacgactttttcctttcttcacgcaggttcccccccagagtgcccaagagcttccccttcaacacctctgtggtgtacaagaagaccctgtttgtggagttcactgaccacctgttcaacattgccaagcccaggcccccctggatgggcctgctgggccccaccatccaggctgaggtgtatgacactgtggtgatcaccctgaagaacatggccagccaccctgtgagcctgcatgctgtgggggtgagctactggaaggcctctgagggggctgagtatgatgaccagaccagccagagggagaaggaggatgacaaggtgttccctgggggcagccacacctatgtgtggcaggtgctgaaggagaatggccccatggcctctgaccccctgtgcctgacctacagctacctgagccatgtggacctggtgaaggacctgaactctggcctgattggggccctgctggtgtgcagggagggcagcctggccaaggagaagacccagaccctgcacaagttcatcctgctgtttgctgtgtttgatgagggcaagagctggcactctgaaaccaagaacagcctgatgcaggacagggatgctgcctctgccagggcctggcccaagatgcacactgtgaatggctatgtgaacaggagcctgcctggcctgattggctgccacaggaagtctgtgtactggcatgtgattggcatgggcaccacccctgaggtgcacagcatcttcctggagggccacaccttcctggtcaggaaccacaggcaggccagcctggagatcagccccatcaccttcctgactgcccagaccctgctgatggacctgggccagttcctgctgagctgccacatcagcagccaccagcatgatggcatggaggcctatgtgaaggtggacagctgccctgaggagccccagctgaggatgaagaacaatgaggaggctgaggactatgatgatgacctgactgactctgagatggatgtggtgaggtttgatgatgacaacagccccagcttcatccagatcaggtctgtggccaagaagcaccccaagacctgggtgcactacattgctgctgaggaggaggactgggactatgcccccctggtgctggcccctgatgacaggagctacaagagccagtacctgaacaatggcccccagaggattggcaggaagtacaagaaggtcaggttcatggcctacactgatgaaaccttcaagaccagggaggccatccagcatgagtctggcatcctgggccccctgctgtatggggaggtgggggacaccctgctgatcatcttcaagaaccaggccagcaggccctacaacatctacccccatggcatcactgatgtgaggcccctgtacagcaggaggctgcccaagggggtgaagcacctgaaggacttccccatcctgcctggggagatcttcaagtacaagtggactgtgactgtggaggatggccccaccaagtctgaccccaggtgcctgaccagatactacagcagctttgtgaacatggagagggacctggcctctggcctgattggccccctgctgatctgctacaaggagtctgtggaccagaggggcaaccagatcatgtctgacaagaggaatgtgatcctgttctctgtgtttgatgagaacaggagctggtacctgactgagaacatccagaggttcctgcccaaccctgctggggtgcagctggaggaccctgagttccaggccagcaacatcatgcacagcatcaatggctatgtgtttgacagcctgcagctgtctgtgtgcctgcatgaggtggcctactggtacatcctgagcattggggcccagactgacttcctgtctgtgttcttctctggctacaccttcaagcacaagatggtgtatgaggacaccctgaccctgttccccttctctggggagactgtgttcatgagcatggagaaccctggcctgtggattctgggctgccacaactctgacttcaggaacaggggcatgactgccctgctgaaagtctccagctgtgacaagaacactggggactactatgaggacagctatgaggacatctctgcctacctgctgagcaagaacaatgccattgagcccaggagcttcagccagaatagcaggcaccccagcaccaggcagaagcagttcaatgccaccaccatcccagagaataccaccctgcagtctgaccaggaggagattgactatgatgacaccatctctgtggagatgaagaaggaggactttgacatctacgacgaggacgagaaccagagccccaggagcttccagaagaagaccaggcactacttcattgctgctgtggagaggctgtgggactatggcatgagcagcagcccccatgtgctgaggaacagggcccagtctggctctgtgccccagttcaagaaggtggtgttccaggagttcactgatggcagcttcacccagcccctgtacagaggggagctgaatgagcacctgggcctgctgggcccctacatcagggctgaggtggaggacaacatcatggtgaccttcaggaaccaggccagcaggccctacagcttctacagcagcctgatcagctatgaggaggaccagaggcagggggctgagcccaggaagaactttgtgaagcccaatgaaaccaagacctacttctggaaggtgcagcaccacatggcccccaccaaggatgagtttgactgcaaggcctgggcctacttctctgatgtggacctggagaaggatgtgcactctggcctgattggccccctgctggtgtgccacaccaacaccctgaaccctgcccatggcaggcaggtgactgtgcaggagtttgccctgttcttcaccatctttgatgaaaccaagagctggtacttcactgagaacatggagaggaactgcagggccccctgcaacatccagatggaggaccccaccttcaaggagaactacaggttccatgccatcaatggctacatcatggacaccctgcctggcctggtgatggcccaggaccagaggatcaggtggtacctgctgagcatgggcagcaatgagaacatccacagcatccacttctctggccatgtgttcactgtgaggaagaaggaggagtacaagatggccctgtacaacctgtaccctggggtgtttgagactgtggagatgctgcccagcaaggctggcatctggagggtggagtgcctgattggggagcacctgcatgctggcatgagcaccctgttcctggtgtacagcaacaagtgccagacccccctgggcatggcctctggccacatcagggacttccagatcactgcctctggccagtatggccagtgggcccccaagctggccaggctgcactactctggcagcatcaatgcctggagcaccaaggagcccttcagctggatcaaggtggacctgctggcccccatgatcatccatggcatcaagacccagggggccaggcagaagttcagcagcctgtacatcagccagttcatcatcatgtacagcctggatggcaagaagtggcagacctacaggggcaacagcactggcaccctgatggtgttctttggcaatgtggacagctctggcatcaagcacaacatcttcaacccccccatcattgccagatacatcaggctgcaccccacccactacagcatcaggagcaccctgaggatggagctgatgggctgtgacctgaacagctgcagcatgcccctgggcatggagagcaaggccatctctgatgcccagatcactgccagcagctacttcaccaacatgtttgccacctggagccccagcaaggccaggctgcacctgcagggcaggagcaatgcctggaggccccaggtcaacaaccccaaggagtggctgcaggtggacttccagaagaccatgaaggtgactggggtgaccacccagggggtgaagagcctgctgaccagcatgtatgtgaaggagttcctgatcagcagcagccaggatggccaccagtggaccctgttcttccagaatggcaaggtgaaggtgttccagggcaaccaggacagcttcacccctgtggtgaacagcctggacccccccctgctgaccagatacctgaggattcacccccagagctgggtgcaccagattgccctgaggatggaggtgctgggctgtgaggcccaggacctgtactgattaattaagagcatcttaccgccatttattcccatatttgttctgtttttcttgatttgggtatacatttaaatgttaataaaacaaaatggtggggcaatcatttacatttttagggatatgtaattactagttcaggtgtattgccacaagacaaacatgttaagaaactttcccgttatttacgctctgttcctgttaatcaacctctggattacaaaatttgtgaaagattgactgatattcttaactatgttgctccttttacgctgtgtggatatgctgctttatagcctctgtatctagctattgcttcccgtacggctttcgttttctcctccttgtataaatcctggttgctgtctcttttagaggagttgtggcccgttgtccgtcaacgtggcgtggtgtgctctgtgtttgctgacgcaacccccactggctggggcattgccaccacctgtcaactcctttctgggactttcgctttccccctcccgatcgccacggcagaactcatcgccgcctgccttgcccgctgctggacaggggctaggttgctgggcactgataattccgtggtgttgtctgtgccttctagttgccagccatctgttgtttgcccctcccccgtgccttccttgaccctggaaggtgccactcccactgtcctttcctaataaaatgaggaaattgcatcgcattgtctgagtaggtgtcattctattctggggggtggggtggggcaggacagcaagggggaggattgggaagacaatagcaggcatgctggggatgcggtgggctctatggctctagagcatggctacgtagataagtagcatggcgggttaatcattaactacacctgcaggaggaacccctagtgatggagttggccactccctctctgcgcgctcgctcgctcactgaggccgggcgaccaaaggtcgcccgacgcccgggcggcctcagtgagcgagcgagcgcgcagctgcctgcagg

SEQ ID NO: 53 - DNA, 6157 bp, Artificial Sequence
  Description of Artificial Sequence: Synthetic polynucleotide
cctgcaggcagctgcgcgctcgctcgctcactgaggccgcccgggcaaagcccgggcgtcgggcgacctttggtcgcccggcctcagtgagcgagcgagcgcgcagagagggagtggccaactccatcactaggggttccttgtagttaatgattaacccgccatgctacttatctacgtagccatgctctagacgggggaggctgctggtgaatattaaccaaggtcaccccagttatcggaggagcaaacaggggctaagtccacacgcgtggtaccgtctgtctgcacatttcgtagagcgagtgttccgatactctaatctccctaggcaaggttcatatttgtgtaggttacttattctccttttgttgactaagtcaataatcagaatcagcaggtttggagtcagcttggcagggatcagcagcctgggttggaaggagggggtataaaagccccttcaccaggagaagccgtcacacagatccacaagctcctgaagaggtaagggtttaagggatggttggttggtggggtattaatgtttaattacctggagcacctgcctgaaatcactttttttcaggttggtttaaacgccgccaccatgcagattgagctgagcacctgcttcttcctgtgcctgctgaggttctgcttctctgccaccaggagatactacctgggggctgtggagctgagctgggactacatgcaaagtgatctgggtgagctgcctgtggatgcaaggtaaaggcatgtcctgtagggtctgatcggggccaggattgtggggatgtctccttgctaatagtagaaaagagtagtatggaagcattacttccagctgctttttgaagtgtccaccaaaatgaacgactttttcctttcttcacgcagatttcctcctagagtgccaaaatcttttccattcaacacctctgtggtgtacaagaagaccctgtttgtggagttcactgaccacctgttcaacattgccaagcccaggcccccctggatgggcctgctgggccccaccatccaggctgaggtgtatgacactgtggtgatcaccctgaagaacatggccagccaccctgtgagcctgcatgctgtgggggtgagctactggaaggcctctgagggggctgagtatgatgaccagaccagccagagggagaaggaggatgacaaggtgttccctgggggcagccacacctatgtgtggcaggtgctgaaggagaatggccccatggcctctgaccccctgtgcctgacctacagctacctgagccatgtggacctggtgaaggacctgaactctggcctgattggggccctgctggtgtgcagggagggcagcctggccaaggagaagacccagaccctgcacaagttcatcctgctgtttgctgtgtttgatgagggcaagagctggcactctgaaaccaagaacagcctgatgcaggacagggatgctgcctctgccagggcctggcccaagatgcacactgtgaatggctatgtgaacaggagcctgcctggcctgattggctgccacaggaagtctgtgtactggcatgtgattggcatgggcaccacccctgaggtgcacagcatcttcctggagggccacaccttcctggtcaggaaccacaggcaggccagcctggagatcagccccatcaccttcctgactgcccagaccctgctgatggacctgggccagttcctgctgagctgccacatcagcagccaccagcatgatggcatggaggcctatgtgaaggtggacagctgccctgaggagccccagctgaggatgaagaacaatgaggaggctgaggactatgatgatgacctgactgactctgagatggatgtggtgaggtttgatgatgacaacagccccagcttcatccagatcaggtctgtggccaagaagcaccccaagacctgggtgcactacattgctgctgaggaggaggactgggactatgcccccctggtgctggcccctgatgacaggagctacaagagccagtacctgaacaatggcccccagaggattggcaggaagtacaagaaggtcaggttcatggcctacactgatgaaaccttcaagaccagggaggccatccagcatgagtctggcatcctgggccccctgctgtatggggaggtgggggacaccctgctgatcatcttcaagaaccaggccagcaggccctacaacatctacccccatggcatcactgatgtgaggcccctgtacagcaggaggctgcccaagggggtgaagcacctgaaggacttccccatcctgcctggggagatcttcaagtacaagtggactgtgactgtggaggatggccccaccaagtctgaccccaggtgcctgaccagatactacagcagctttgtgaacatggagagggacctggcctctggcctgattggccccctgctgatctgctacaaggagtctgtggaccagaggggcaaccagatcatgtctgacaagaggaatgtgatcctgttctctgtgtttgatgagaacaggagctggtacctgactgagaacatccagaggttcctgcccaaccctgctggggtgcagctggaggaccctgagttccaggccagcaacatcatgcacagcatcaatggctatgtgtttgacagcctgcagctgtctgtgtgcctgcatgaggtggcctactggtacatcctgagcattggggcccagactgacttcctgtctgtgttcttctctggctacaccttcaagcacaagatggtgtatgaggacaccctgaccctgttccccttctctggggagactgtgttcatgagcatggagaaccctggcctgtggattctgggctgccacaactctgacttcaggaacaggggcatgactgccctgctgaaagtctccagctgtgacaagaacactggggactactatgaggacagctatgaggacatctctgcctacctgctgagcaagaacaatgccattgagcccaggagcttcagccagaatagcaggcaccccagcaccaggcagaagcagttcaatgccaccaccatcccagagaataccaccctgcagtctgaccaggaggagattgactatgatgacaccatctctgtggagatgaagaaggaggactttgacatctacgacgaggacgagaaccagagccccaggagcttccagaagaagaccaggcactacttcattgctgctgtggagaggctgtgggactatggcatgagcagcagcccccatgtgctgaggaacagggcccagtctggctctgtgccccagttcaagaaggtggtgttccaggagttcactgatggcagcttcacccagcccctgtacagaggggagctgaatgagcacctgggcctgctgggcccctacatcagggctgaggtggaggacaacatcatggtgaccttcaggaaccaggccagcaggccctacagcttctacagcagcctgatcagctatgaggaggaccagaggcagggggctgagcccaggaagaactttgtgaagcccaatgaaaccaagacctacttctggaaggtgcagcaccacatggcccccaccaaggatgagtttgactgcaaggcctgggcctacttctctgatgtggacctggagaaggatgtgcactctggcctgattggccccctgctggtgtgccacaccaacaccctgaaccctgcccatggcaggcaggtgactgtgcaggagtttgccctgttcttcaccatctttgatgaaaccaagagctggtacttcactgagaacatggagaggaactgcagggccccctgcaacatccagatggaggaccccaccttcaaggagaactacaggttccatgccatcaatggctacatcatggacaccctgcctggcctggtgatggcccaggaccagaggatcaggtggtacctgctgagcatgggcagcaatgagaacatccacagcatccacttctctggccatgtgttcactgtgaggaagaaggaggagtacaagatggccctgtacaacctgtaccctggggtgtttgagactgtggagatgctgcccagcaaggctggcatctggagggtggagtgcctgattggggagcacctgcatgctggcatgagcaccctgttcctggtgtacagcaacaagtgccagacccccctgggcatggcctctggccacatcagggacttccagatcactgcctctggccagtatggccagtgggcccccaagctggccaggctgcactactctggcagcatcaatgcctggagcaccaaggagcccttcagctggatcaaggtggacctgctggcccccatgatcatccatggcatcaagacccagggggccaggcagaagttcagcagcctgtacatcagccagttcatcatcatgtacagcctggatggcaagaagtggcagacctacaggggcaacagcactggcaccctgatggtgttctttggcaatgtggacagctctggcatcaagcacaacatcttcaacccccccatcattgccagatacatcaggctgcaccccacccactacagcatcaggagcaccctgaggatggagctgatgggctgtgacctgaacagctgcagcatgcccctgggcatggagagcaaggccatctctgatgcccagatcactgccagcagctacttcaccaacatgtttgccacctggagccccagcaaggccaggctgcacctgcagggcaggagcaatgcctggaggccccaggtcaacaaccccaaggagtggctgcaggtggacttccagaagaccatgaaggtgactggggtgaccacccagggggtgaagagcctgctgaccagcatgtatgtgaaggagttcctgatcagcagcagccaggatggccaccagtggaccctgttcttccagaatggcaaggtgaaggtgttccagggcaaccaggacagcttcacccctgtggtgaacagcctggacccccccctgctgaccagatacctgaggattcacccccagagctgggtgcaccagattgccctgaggatggaggtgctgggctgtgaggcccaggacctgtactgattaattaagagcatcttaccgccatttattcccatatttgttctgtttttcttgatttgggtatacatttaaatgttaataaaacaaaatggtggggcaatcatttacatttttagggatatgtaattactagttcaggtgtattgccacaagacaaacatgttaagaaactttcccgttatttacgctctgttcctgttaatcaacctctggattacaaaatttgtgaaagattgactgatattcttaactatgttgctccttttacgctgtgtggatatgctgctttatagcctctgtatctagctattgcttcccgtacggctttcgttttctcctccttgtataaatcctggttgctgtctcttttagaggagttgtggcccgttgtccgtcaacgtggcgtggtgtgctctgtgtttgctgacgcaacccccactggctggggcattgccaccacctgtcaactcctttctgggactttcgctttccccctcccgatcgccacggcagaactcatcgccgcctgccttgcccgctgctggacaggggctaggttgctgggcactgataattccgtggtgttgtctgtgccttctagttgccagccatctgttgtttgcccctcccccgtgccttccttgaccctggaaggtgccactcccactgtcctttcctaataaaatgaggaaattgcatcgcattgtctgagtaggtgtcattctattctggggggtggggtggggcaggacagcaagggggaggattgggaagacaatagcaggcatgctggggatgcggtgggctctatggctctagagcatggctacgtagataagtagcatggcgggttaatcattaactacacctgcaggaggaacccctagtgatggagttggccactccctctctgcgcgctcgctcgctcactgaggccgggcgaccaaaggtcgcccgacgcccgggcggcctcagtgagcgagcgagcgcgcagctgcctgcagg

SEQ ID NO: 54 - DNA, 6683 bp, Artificial Sequence
  Description of Artificial Sequence: Synthetic polynucleotide
cctgcaggcagctgcgcgctcgctcgctcactgaggccgcccgggcaaagcccgggcgtcgggcgacctttggtcgcccggcctcagtgagcgagcgagcgcgcagagagggagtggccaactccatcactaggggttccttgtagttaatgattaacccgccatgctacttatcgcggccgccgggggaggctgctggtgaatattaaccaaggtcaccccagttatcggaggagcaaacaggggctaagtccacacgcgtggtaccgtctgtctgcacatttcgtagagcgagtgttccgatactctaatctccctaggcaaggttcatatttgtgtaggttacttattctccttttgttgactaagtcaataatcagaatcagcaggtttggagtcagcttggcagggatcagcagcctgggttggaaggagggggtataaaagccccttcaccaggagaagccgtcacacagatccacaagctcctgaagaggtaagggtttaagggatggttggttggtggggtattaatgtttaattacctggagcacctgcctgaaatcactttttttcaggttggtttaaacgggacatcgtagagagtcgtacttacatttcgtgggctaagtttaagctactctcgctccgggataagagtttcaatgcagattgagctgagcacctgcttcttcctgtgcctgctgaggttctgcttctctgccaccaggagatactacctgggggctgtggagctgagctgggactacatgcagtctgacctgggggagctgcctgtggatgccaggttcccccccagagtgcccaagagcttccccttcaacacctctgtggtgtacaagaagaccctgtttgtggagttcactgaccacctgttcaacattgccaagcccaggcccccctggatgggcctgctgggccccaccatccaggctgaggtgtatgacactgtggtgatcaccctgaagaacatggccagccaccctgtgagcctgcatgctgtgggggtgagctactggaaggcctctgagggggctgagtatgatgaccagaccagccagagggagaaggaggatgacaaggtgttccctgggggcagccacacctatgtgtggcaggtgctgaaggagaatggccccatggcctctgaccccctgtgcctgacctacagctacctgagccatgtggacctggtgaaggacctgaactctggcctgattggggccctgctggtgtgcagggagggcagcctggccaaggagaagacccagaccctgcacaagttcatcctgctgtttgctgtgtttgatgagggcaagagctggcactctgaaaccaagaacagcctgatgcaggacagggatgctgcctctgccagggcctggcccaagatgcacactgtgaatggctatgtgaacaggagcctgcctggcctgattggctgccacaggaagtctgtgtactggcatgtgattggcatgggcaccacccctgaggtgcacagcatcttcctggagggccacaccttcctggtcaggaaccacaggcaggccagcctggagatcagccccatcaccttcctgactgcccagaccctgctgatggacctgggccagttcctgctgagctgccacatcagcagccaccagcatgatggcatggaggcctatgtgaaggtggacagctgccctgaggagccccagctgaggatgaagaacaatgaggaggctgaggactatgatgatgacctgactgactctgagatggatgtggtgaggtttgatgatgacaacagccccagcttcatccagatcaggtctgtggccaagaagcaccccaagacctgggtgcactacattgctgctgaggaggaggactgggactatgcccccctggtgctggcccctgatgacaggagctacaagagccagtacctgaacaatggcccccagaggattggcaggaagtacaagaaggtcaggttcatggcctacactgatgaaaccttcaagaccagggaggccatccagcatgagtctggcatcctgggccccctgctgtatggggaggtgggggacaccctgctgatcatcttcaagaaccaggccagcaggccctacaacatctacccccatggcatcactgatgtgaggcccctgtacagcaggaggctgcccaagggggtgaagcacctgaaggacttccccatcctgcctggggagatcttcaagtacaagtggactgtgactgtggaggatggccccaccaagtctgaccccaggtgcctgaccagatactacagcagctttgtgaacatggagagggacctggcctctggcctgattggccccctgctgatctgctacaaggagtctgtggaccagaggggcaaccagatcatgtctgacaagaggaatgtgatcctgttctctgtgtttgatgagaacaggagctggtacctgactgagaacatccagaggttcctgcccaaccctgctggggtgcagctggaggaccctgagttccaggccagcaacatcatgcacagcatcaatggctatgtgtttgacagcctgcagctgtctgtgtgcctgcatgaggtggcctactggtacatcctgagcattggggcccagactgacttcctgtctgtgttcttctctggctacaccttcaagcacaagatggtgtatgaggacaccctgaccctgttccccttctctggggagactgtgttcatgagcatggagaaccctggcctgtggattctgggctgccacaactctgacttcaggaacaggggcatgactgccctgctgaaagtctccagctgtgacaagaacactggggactactatgaggacagctatgaggacatctctgcctacctgctgagcaagaacaatgccattgagcccaggagcttcagccagaatagcaggcaccccagcaccaggcagaagcagttcaatgccaccaccatcccagagaatgatattgagaagactgacccttggtttgcccacaggacccccatgccaaagattcagaatgtgtcctcatctgacttgctgatgctgctgaggcagagccccacaccccatgggctgagcctgtctgacctgcaggaggccaaatatgaaaccttttcagatgaccccagcccaggagccattgacagtaacaacagcctgtctgagatgacccacttcaggccccagctccatcactctggggacatggtgttcaccccagagtcaggcctgcagctgaggctgaatgagaagctgggcaccacagcagccactgagctgaagaagctggactttaaggtgtccagcacctccaacaacctgatcagcaccatcccctctgacaacctggcagctggcactgataacacctccagcctgggcccaccttctatgcctgtgcactatgacagccaactggacaccaccctgtttgggaagaagtcctctccactgacagagtctggagggcccctgtccctgtctgaggagaacaatgactccaagctgctggagtctgggctgatgaacagtcaggagagctcctggggaaagaatgtgtccagcagggagatcaccaggaccaccctgcagtctgaccaggaggagattgactatgatgacaccatctctgtggagatgaagaaggaggactttgacatctacgacgaggacgagaaccagagccccaggagcttccagaagaagaccaggcactacttcattgctgctgtggagaggctgtgggactatggcatgagcagcagcccccatgtgctgaggaacagggcccagtctggctctgtgccccagttcaagaaggtggtgttccaggagttcactgatggcagcttcacccagcccctgtacagaggggagctgaatgagcacctgggcctgctgggcccctacatcagggctgaggtggaggacaacatcatggtgaccttcaggaaccaggccagcaggccctacagcttctacagcagcctgatcagctatgaggaggaccagaggcagggggctgagcccaggaagaactttgtgaagcccaatgaaaccaagacctacttctggaaggtgcagcaccacatggcccccaccaaggatgagtttgactgcaaggcctgggcctacttctctgatgtggacctggagaaggatgtgcactctggcctgattggccccctgctggtgtgccacaccaacaccctgaaccctgcccatggcaggcaggtgactgtgcaggagtttgccctgttcttcaccatctttgatgaaaccaagagctggtacttcactgagaacatggagaggaactgcagggccccctgcaacatccagatggaggaccccaccttcaaggagaactacaggttccatgccatcaatggctacatcatggacaccctgcctggcctggtgatggcccaggaccagaggatcaggtggtacctgctgagcatgggcagcaatgagaacatccacagcatccacttctctggccatgtgttcactgtgaggaagaaggaggagtacaagatggccctgtacaacctgtaccctggggtgtttgagactgtggagatgctgcccagcaaggctggcatctggagggtggagtgcctgattggggagcacctgcatgctggcatgagcaccctgttcctggtgtacagcaacaagtgccagacccccctgggcatggcctctggccacatcagggacttccagatcactgcctctggccagtatggccagtgggcccccaagctggccaggctgcactactctggcagcatcaatgcctggagcaccaaggagcccttcagctggatcaaggtggacctgctggcccccatgatcatccatggcatcaagacccagggggccaggcagaagttcagcagcctgtacatcagccagttcatcatcatgtacagcctggatggcaagaagtggcagacctacaggggcaacagcactggcaccctgatggtgttctttggcaatgtggacagctctggcatcaagcacaacatcttcaacccccccatcattgccagatacatcaggctgcaccccacccactacagcatcaggagcaccctgaggatggagctgatgggctgtgacctgaacagctgcagcatgcccctgggcatggagagcaaggccatctctgatgcccagatcactgccagcagctacttcaccaacatgtttgccacctggagccccagcaaggccaggctgcacctgcagggcaggagcaatgcctggaggccccaggtcaacaaccccaaggagtggctgcaggtggacttccagaagaccatgaaggtgactggggtgaccacccagggggtgaagagcctgctgaccagcatgtatgtgaaggagttcctgatcagcagcagccaggatggccaccagtggaccctgttcttccagaatggcaaggtgaaggtgttccagggcaaccaggacagcttcacccctgtggtgaacagcctggacccccccctgctgaccagatacctgaggattcacccccagagctgggtgcaccagattgccctgaggatggaggtgctgggctgtgaggcccaggacctgtactgattaattaagagcatcttaccgccatttattcccatatttgttctgtttttcttgatttgggtatacatttaaatgttaataaaacaaaatggtggggcaatcatttacatttttagggatatgtaattactagttcaggtgtattgccacaagacaaacatgttaagaaactttcccgttatttacgctctgttcctgttaatcaacctctggattacaaaatttgtgaaagattgactgatattcttaactatgttgctccttttacgctgtgtggatatgctgctttatagcctctgtatctagctattgcttcccgtacggctttcgttttctcctccttgtataaatcctggttgctgtctcttttagaggagttgtggcccgttgtccgtcaacgtggcgtggtgtgctctgtgtttgctgacgcaacccccactggctggggcattgccaccacctgtcaactcctttctgggactttcgctttccccctcccgatcgccacggcagaactcatcgccgcctgccttgcccgctgctggacaggggctaggttgctgggcactgataattccgtggtgttgtctgtgccttctagttgccagccatctgttgtttgcccctcccccgtgccttccttgaccctggaaggtgccactcccactgtcctttcctaataaaatgaggaaattgcatcgcattgtctgagtaggtgtcattctattctggggggtggggtggggcaggacagcaagggggaggattgggaagacaatagcaggcatgctggggatgcggtgggctctatggctctagagcatggctacgtagataagtagcatggcgggttaatcattaactacacctgcaggaggaacccctagtgatggagttggccactccctctctgcgcgctcgctcgctcactgaggccgggcgaccaaaggtcgcccgacgcccgggcggcctcagtgagcgagcgagcgcgcagctgcctgcagg

SEQ ID NO: 55 - DNA, 6737 bp, Artificial Sequence
  Description of Artificial Sequence: Synthetic polynucleotide
cctgcaggcagctgcgcgctcgctcgctcactgaggccgcccgggcaaagcccgggcgtcgggcgacctttggtcgcccggcctcagtgagcgagcgagcgcgcagagagggagtggccaactccatcactaggggttccttgtagttaatgattaacccgccatgctacttatcgcggccgccgggggaggctgctggtgaatattaaccaaggtcaccccagttatcggaggagcaaacaggggctaagtccacacgcgtggtaccgtctgtctgcacatttcgtagagcgagtgttccgatactctaatctccctaggcaaggttcatatttgtgtaggttacttattctccttttgttgactaagtcaataatcagaatcagcaggtttggagtcagcttggcagggatcagcagcctgggttggaaggagggggtataaaagccccttcaccaggagaagccgtcacacagatccacaagctcctgaagaggtaagggtttaagggatggttggttggtggggtattaatgtttaattacctggagcacctgcctgaaatcactttttttcaggttggtttaaacgccgccaccatgcaaattgagttatccacctgtttcttcctctgtctcctgaggttctgcttctctgccaccaggagatactacctgggggctgtggagctgtcctgggactacatgcagtcagacctgggggagctgccagttgatgccaggttcccccccagagtccccaagtccttccccttcaacacctcagtggtgtacaaaaagaccctgtttgtggagttcacagaccacctgttcaacatagccaagcccaggcccccctggatgggcctgctgggccccaccatccaggcagaggtttatgacacagtggtcatcaccctgaagaacatggcctcccaccctgtgtccctccatgctgtgggggtgagctactggaaggccagtgagggggcagaatatgatgaccagaccagccagagggagaaggaggatgacaaggtgttcccagggggcagccacacctatgtgtggcaggtcctgaaggagaatggccccatggcctctgaccccctctgcctcacctactcctacctgtcccatgtggacctggtgaaggacctcaactctggcctgattggagccctcctggtgtgcagggaggggagcctggccaaggaaaagacccagaccctgcacaagtttatcctgctctttgcagtctttgatgaggggaagtcctggcacagtgagaccaagaactccctgatgcaggacagagatgctgcctcagccagggcctggcccaagatgcacacagtgaatgggtatgtcaacaggagcctgccaggcctgattgggtgccacagaaagtcagtgtactggcatgtcattggcatgggcaccaccccagaggtgcactccatcttcctggagggccacaccttcctggtgaggaaccacagacaggccagcctggagatcagcccaatcaccttcctcacagcccagaccctcctcatggacctgggccagtttctcctgagctgccacatctcctcccaccagcatgatggcatggaggcctatgtgaaggtggacagctgccctgaggagccccagctcaggatgaagaacaatgaggaggcagaggactatgatgatgatctgacagactctgagatggatgtggtgagatttgatgatgacaacagcccctccttcatccagatcaggtctgtggccaagaagcaccctaagacctgggtgcactacattgcagctgaggaggaggactgggactatgcccccctggtcctggcccctgatgataggtcctacaagtcccagtacctgaacaatggcccccagaggatagggagaaagtacaagaaggtgaggttcatggcctacactgatgagaccttcaagactagggaagccatccagcatgagtctgggatcctgggccccctcctctatggggaggtgggggacaccctgctgatcatcttcaagaaccaggccagcaggccctacaacatttacccccatgggatcacagatgtgagacccctgtacagcaggagactgccaaagggggtgaagcacctgaaggacttccccatcctgccaggggagatcttcaagtacaagtggactgtgacagtggaggatgggcccaccaaatctgaccctagatgcctgaccagatactacagcagctttgtgaacatggagagggacctggcctctggactgattggccctctgctgatctgctacaaggagagtgtggaccagaggggaaaccagatcatgtctgacaagaggaatgtgatcctgttctcagtgtttgatgagaacagatcctggtacctcactgagaacatccagaggttcctgcccaacccagcaggggtgcagctggaggacccagagttccaggcctccaacatcatgcactccatcaatggctatgtctttgactccctgcagctgtcagtgtgcctgcatgaggtggcctactggtacatcctctccattggagcccagactgacttcctgtcagtcttcttcagtggctacaccttcaagcacaagatggtctatgaggacactctgaccctgttccccttctctggggagactgtgttcatgtccatggagaaccctggactgtggatcctgggctgccacaacagtgacttcaggaacaggggcatgactgccctgctgaaggtctccagctgtgacaagaacactggggactactatgaggactcctatgaggacatctctgcctacctgctgtccaagaacaatgccattgagcccaggtccttctcccagaacagcagacacccctccaccaggcagaagcagttcaatgcaaccaccatccctgaaaatgatattgagaagacagacccctggtttgctcacaggacccccatgcccaagatccagaatgtgagctcctctgacctgctgatgctgctgaggcagtctcctaccccccatgggctgtccctgagtgacctgcaggaggccaagtatgagaccttctcagatgaccccagcccaggagccattgattccaacaacagcctgtcagagatgacccacttcaggccccagctgcaccactctggggacatggtgttcacccctgagtctgggctgcagctgaggctgaatgagaagctgggcaccactgcagccacagagctcaagaagctggactttaaggtgagctccaccagcaacaacctgatcagcacaatccctagtgacaatctggctgctggcacagacaacacctcctccctgggcccccccagcatgcctgtgcactatgactcccagctggacaccaccctgtttgggaagaagtccagccccctgacagagtcagggggccccctgtccctctctgaggagaacaatgacagtaagctgctggagagtgggctgatgaactcccaggagtcctcctggggaaagaatgtctccagcagggagatcaccaggaccaccctgcagagtgaccaggaggagattgactatgatgacaccatctctgtggagatgaagaaggaggactttgacatctatgatgaggatgagaaccagagccctagaagcttccagaagaagaccagacactacttcattgctgcagtggaaagactgtgggactatgggatgagctcctccccccatgtgctgaggaacagggcccagtctggctctgtgccccagttcaagaaggtggtgttccaggagttcactgatggctccttcacccagcccctgtacaggggagagctgaatgagcacctgggcctgctgggcccctacatcagggctgaggtggaggacaatatcatggtgaccttcagaaaccaggcctccagaccttactccttctacagcagcctgatctcctatgaggaggaccagagacagggggctgagcccaggaagaactttgtgaagcccaatgagaccaagacctacttctggaaggtgcagcaccacatggcccccaccaaggatgagtttgactgcaaggcctgggcctacttctctgatgtggacctggagaaggatgtgcactctggcctgattggccccctgctggtgtgccacaccaacaccctgaaccctgcccatggcaggcaggtgactgtgcaggagtttgccctgttcttcaccatctttgatgagaccaagagctggtacttcactgagaacatggagaggaactgcagggccccctgcaacatccagatggaggaccccaccttcaaggagaactacaggttccatgccatcaatggctacatcatggacaccctgcctggcctggtgatggcccaggaccagaggatcaggtggtacctgctgagcatggggagcaatgagaacatccacagcatccacttctctggccatgtgttcacagtgaggaagaaggaggagtacaagatggccctgtacaacctgtaccctggggtgtttgagacagtggagatgctgccctccaaggctggaatctggagggtggagtgcctgattggggagcacctgcatgctggcatgagcaccctgttcctggtgtacagcaacaagtgccagacccccctgggcatggcctctggccacatcagagacttccagatcacagcctcaggccagtatggccagtgggcccccaagctggccaggctgcactactctggcagcatcaatgcctggtccaccaaggagcccttcagctggatcaaggtggacctcctggcccccatgatcatccatggcatcaagacccagggggccaggcagaagttcagctccctgtacatctcccagttcatcatcatgtactccctggatggcaagaagtggcagacctacagaggcaacagcacaggcaccctgatggtgttctttggcaatgtggacagctctgggatcaagcacaacatcttcaacccccccatcattgccaggtacatcagactgcaccccacccactactccatcaggtccaccctgagaatggagctgatgggctgtgacctgaacagctgcagcatgcccctgggcatggagagcaaggccatctctgatgcccagatcacagccagcagctacttcaccaacatgtttgccacctggtcccccagcaaggccaggctgcacctgcagggcaggagcaatgcctggaggccccaggtgaacaaccccaaggagtggctgcaggtggacttccagaagaccatgaaggtgacaggggtgaccacccagggggtgaagtccctgctgaccagcatgtatgtgaaggagttcctgatcagcagctcccaggatggccaccagtggaccctgttcttccagaatggcaaggtgaaggtgttccagggcaaccaggacagcttcacccctgtggtgaactccctggacccccccctgctgaccagatacctgaggatccacccccagtcctgggtgcaccagattgccctgagaatggaggtgctgggctgtgaggcccaggacctgtactgattaattaagagcatcttaccgccatttattcccatatttgttctgtttttcttgatttgggtatacatttaaatgttaataaaacaaaatggtggggcaatcatttacatttttagggatatgtaattactagttcaggtgtattgccacaagacaaacatgttaagaaactttcccgttatttacgctctgttcctgttaatcaacctctggattacaaaatttgtgaaagattgactgatattcttaactatgttgctccttttacgctgtgtggatatgctgctttatagcctctgtatctagctattgcttcccgtacggctttcgttttctcctccttgtataaatcctggttgctgtctcttttagaggagttgtggcccgttgtccgtcaacgtggcgtggtgtgctctgtgtttgctgacgcaacccccactggctggggcattgccaccacctgtcaactcctttctgggactttcgctttccccctcccgatcgccacggcagaactcatcgccgcctgccttgcccgctgctggacaggggctaggttgctgggcactgataattccgtggtgttgtctgtgccttctagttgccagccatctgttgtttgcccctcccccgtgccttccttgaccctggaaggtgccactcccactgtcctttcctaataaaatgaggaaattgcatcgcattgtctgagtaggtgtcattctattctggggggtggggtggggcaggacagcaagggggaggattgggaagacaatagcaggcatgctggggatgcggtgggctctatggcgaattcagcctgcacttagagtgtctaggtggggactttccgctggggactttccgctggggactttccgctggggactttccgctggggactttccgcaggattagtcccccagtgcactctagagcatggctacgtagataagtagcatggcgggttaatcattaactacacctgcaggaggaacccctagtgatggagttggccactccctctctgcgcgctcgctcgctcactgaggccgggcgaccaaaggtcgcccgacgcccgggcggcctcagtgagcgagcgagcgcgcagctgcctgcagg

SEQ ID NO: 56 - DNA, 7463 bp, Artificial Sequence
  Description of Artificial Sequence: Synthetic polynucleotide
cctgcaggcagctgcgcgctcgctcgctcactgaggccgcccgggcaaagcccgggcgtcgggcgacctttggtcgcccggcctcagtgagcgagcgagcgcgcagagagggagtggccaactccatcactaggggttccttgtagttaatgattaacccgccatgctacttatcgcggccgccgggggaggctgctggtgaatattaaccaaggtcaccccagttatcggaggagcaaacaggggctaagtccacacgcgtggtaccgtctgtctgcacatttcgtagagcgagtgttccgatactctaatctccctaggcaaggttcatatttgtgtaggttacttattctccttttgttgactaagtcaataatcagaatcagcaggtttggagtcagcttggcagggatcagcagcctgggttggaaggagggggtataaaagccccttcaccaggagaagccgtcacacagatccacaagctcctgaagaggtaagggtttaagggatggttggttggtggggtattaatgtttaattacctggagcacctgcctgaaatcactttttttcaggttggtttaaacgccgccaccatgcaaattgagttatccacctgtttcttcctctgtctcctgaggttctgcttctctgccaccaggagatactacctgggggctgtggagctgtcctgggactacatgcagtcagacctgggggagctgccagttgatgccaggttcccccccagagtccccaagtccttccccttcaacacctcagtggtgtacaaaaagaccctgtttgtggagttcacagaccacctgttcaacatagccaagcccaggcccccctggatgggcctgctgggccccaccatccaggcagaggtttatgacacagtggtcatcaccctgaagaacatggcctcccaccctgtgtccctccatgctgtgggggtgagctactggaaggccagtgagggggcagaatatgatgaccagaccagccagagggagaaggaggatgacaaggtgttcccagggggcagccacacctatgtgtggcaggtcctgaaggagaatggccccatggcctctgaccccctctgcctcacctactcctacctgtcccatgtggacctggtgaaggacctcaactctggcctgattggagccctcctggtgtgcagggaggggagcctggccaaggaaaagacccagaccctgcacaagtttatcctgctctttgcagtctttgatgaggggaagtcctggcacagtgagaccaagaactccctgatgcaggacagagatgctgcctcagccagggcctggcccaagatgcacacagtgaatgggtatgtcaacaggagcctgccaggcctgattgggtgccacagaaagtcagtgtactggcatgtcattggcatgggcaccaccccagaggtgcactccatcttcctggagggccacaccttcctggtgaggaaccacagacaggccagcctggagatcagcccaatcaccttcctcacagcccagaccctcctcatggacctgggccagtttctcctgagctgccacatctcctcccaccagcatgatggcatggaggcctatgtgaaggtggacagctgccctgaggagccccagctcaggatgaagaacaatgaggaggcagaggactatgatgatgatctgacagactctgagatggatgtggtgagatttgatgatgacaacagcccctccttcatccagatcaggtctgtggccaagaagcaccctaagacctgggtgcactacattgcagctgaggaggaggactgggactatgcccccctggtcctggcccctgatgataggtcctacaagtcccagtacctgaacaatggcccccagaggatagggagaaagtacaagaaggtgaggttcatggcctacactgatgagaccttcaagactagggaagccatccagcatgagtctgggatcctgggccccctcctctatggggaggtgggggacaccctgctgatcatcttcaagaaccaggccagcaggccctacaacatttacccccatgggatcacagatgtgagacccctgtacagcaggagactgccaaagggggtgaagcacctgaaggacttccccatcctgccaggggagatcttcaagtacaagtggactgtgacagtggaggatgggcccaccaaatctgaccctagatgcctgaccagatactacagcagctttgtgaacatggagagggacctggcctctggactgattggccctctgctgatctgctacaaggagagtgtggaccagaggggaaaccagatcatgtctgacaagaggaatgtgatcctgttctcagtgtttgatgagaacagatcctggtacctcactgagaacatccagaggttcctgcccaacccagcaggggtgcagctggaggacccagagttccaggcctccaacatcatgcactccatcaatggctatgtctttgactccctgcagctgtcagtgtgcctgcatgaggtggcctactggtacatcctctccattggagcccagactgacttcctgtcagtcttcttcagtggctacaccttcaagcacaagatggtctatgaggacactctgaccctgttccccttctctggggagactgtgttcatgtccatggagaaccctggactgtggatcctgggctgccacaacagtgacttcaggaacaggggcatgactgccctgctgaaggtctccagctgtgacaagaacactggggactactatgaggactcctatgaggacatctctgcctacctgctgtccaagaacaatgccattgagcccaggtccttctcccagaacagcagacacccctccaccaggcagaagcagttcaatgcaaccaccatccctgaaaatgatattgagaagacagacccctggtttgctcacaggacccccatgcccaagatccagaatgtgagctcctctgacctgctgatgctgctgaggcagtctcctaccccccatgggctgtccctgagtgacctgcaggaggccaagtatgagaccttctcagatgaccccagcccaggagccattgattccaacaacagcctgtcagagatgacccacttcaggccccagctgcaccactctggggacatggtgttcacccctgagtctgggctgcagctgaggctgaatgagaagctgggcaccactgcagccacagagctcaagaagctggactttaaggtgagctccaccagcaacaacctgatcagcacaatccctagtgacaatctggctgctggcacagacaacacctcctccctgggcccccccagcatgcctgtgcactatgactcccagctggacaccaccctgtttgggaagaagtccagccccctgacagagtcagggggccccctgtccctctctgaggagaacaatgacagtaagctgctggagagtgggctgatgaactcccaggagtcctcctggggaaagaatgtctccagcagggagatcaccaggaccaccctgcagagtgaccaggaggagattgactatgatgacaccatctctgtggagatgaagaaggaggactttgacatctatgatgaggatgagaaccagagccctagaagcttccagaagaagaccagacactacttcattgctgcagtggaaagactgtgggactatgggatgagctcctccccccatgtgctgaggaacagggcccagtctggctctgtgccccagttcaagaaggtggtgttccaggagttcactgatggctccttcacccagcccctgtacaggggagagctgaatgagcacctgggcctgctgggcccctacatcagggctgaggtggaggacaatatcatggtgaccttcagaaaccaggcctccagaccttactccttctacagcagcctgatctcctatgaggaggaccagagacagggggctgagcccaggaagaactttgtgaagcccaatgagaccaagacctacttctggaaggtgcagcaccacatggcccccaccaaggatgagtttgactgcaaggcctgggcctacttctctgatgtggacctggagaaggatgtgcactctggcctgattggccccctgctggtgtgccacaccaacaccctgaaccctgcccatggcaggcaggtgactgtgcaggagtttgccctgttcttcaccatctttgatgagaccaagagctggtacttcactgagaacatggagaggaactgcagggccccctgcaacatccagatggaggaccccaccttcaaggagaactacaggttccatgccatcaatggctacatcatggacaccctgcctggcctggtgatggcccaggaccagaggatcaggtggtacctgctgagcatggggagcaatgagaacatccacagcatccacttctctggccatgtgttcacagtgaggaagaaggaggagtacaagatggccctgtacaacctgtaccctggggtgtttgagacagtggagatgctgccctccaaggctggaatctggagggtggagtgcctgattggggagcacctgcatgctggcatgagcaccctgttcctggtgtacagcaacaagtgccagacccccctgggcatggcctctggccacatcagagacttccagatcacagcctcaggccagtatggccagtgggcccccaagctggccaggctgcactactctggcagcatcaatgcctggtccaccaaggagcccttcagctggatcaaggtggacctcctggcccccatgatcatccatggcatcaagacccagggggccaggcagaagttcagctccctgtacatctcccagttcatcatcatgtactccctggatggcaagaagtggcagacctacagaggcaacagcacaggcaccctgatggtgttctttggcaatgtggacagctctgggatcaagcacaacatcttcaacccccccatcattgccaggtacatcagactgcaccccacccactactccatcaggtccaccctgagaatggagctgatgggctgtgacctgaacagctgcagcatgcccctgggcatggagagcaaggccatctctgatgcccagatcacagccagcagctacttcaccaacatgtttgccacctggtcccccagcaaggccaggctgcacctgcagggcaggagcaatgcctggaggccccaggtgaacaaccccaaggagtggctgcaggtggacttccagaagaccatgaaggtgacaggggtgaccacccagggggtgaagtccctgctgaccagcatgtatgtgaaggagttcctgatcagcagctcccaggatggccaccagtggaccctgttcttccagaatggcaaggtgaaggtgttccagggcaaccaggacagcttcacccctgtggtgaactccctggacccccccctgctgaccagatacctgaggatccacccccagtcctgggtgcaccagattgccctgagaatggaggtgctgggctgtgaggcccaggacctgtactgattaattaagagcatcttaccgccatttattcccatatttgttctgtttttcttgatttgggtatacatttaaatgttaataaaacaaaatggtggggcaatcatttacatttttagggatatgtaattactagttcaggtgtattgccacaagacaaacatgttaagaaactttcccgttatttacgctctgttcctgttaatcaacctctggattacaaaatttgtgaaagattgactgatattcttaactatgttgctccttttacgctgtgtggatatgctgctttatagcctctgtatctagctattgcttcccgtacggctttcgttttctcctccttgtataaatcctggttgctgtctcttttagaggagttgtggcccgttgtccgtcaacgtggcgtggtgtgctctgtgtttgctgacgcaacccccactggctggggcattgccaccacctgtcaactcctttctgggactttcgctttccccctcccgatcgccacggcagaactcatcgccgcctgccttgcccgctgctggacaggggctaggttgctgggcactgataattccgtggtgttgtctgtgccttctagttgccagccatctgttgtttgcccctcccccgtgccttccttgaccctggaaggtgccactcccactgtcctttcctaataaaatgaggaaattgcatcgcattgtctgagtaggtgtcattctattctggggggtggggtggggcaggacagcaagggggaggattgggaagacaatagcaggcatgctggggatgcggtgggctctatggcgaattcaacaggttagtttgactagctggttgctgactaattgagatgcatgctttgcatacttctgcctgctggggagcctggggactttccacacctggttgctgactaattgagatgcatgctttgcatacttctgcctgctggggagcctggggactttccacaccttaagaatgtaaattctgggtggttgctgactaattgagatgcatgctttgcatacttctgcctgctggggagcctggggactttccacacctggttgctgactaattgagatgcatgctttgcatacttctgcctgctggggagcctggggactttccacacctagttacctaatttgttagatggttgctgactaattgagatgcatgctttgcatacttctgcctgctggggagcctggggactttccacacctggttgctgactaattgagatgcatgctttgcatacttctgcctgctggggagcctggggactttccacaccaatggcactcaaacagtatgtggttgctgactaattgagatgcatgctttgcatacttctgcctgctggggagcctggggactttccacacctggttgctgactaattgagatgcatgctttgcatacttctgcctgctggggagcctggggactttccacaccacttttagtcagaggttaattggttgctgactaattgagatgcatgctttgcatacttctgcctgctggggagcctggggactttccacacctggttgctgactaattgagatgcatgctttgcatacttctgcctgctggggagcctggggactttccacaccttggctcctagatcatgcactctagagcatggctacgtagataagtagcatggcgggttaatcattaactacacctgcaggaggaacccctagtgatggagttggccactccctctctgcgcgctcgctcgctcactgaggccgggcgaccaaaggtcgcccgacgcccgggcggcctcagtgagcgagcgagcgcgcagctgcctgcagg

SEQ ID NO: 57 - DNA, 6737 bp, Artificial Sequence
  Description of Artificial Sequence: Synthetic polynucleotide
cctgcaggcagctgcgcgctcgctcgctcactgaggccgcccgggcaaagcccgggcgtcgggcgacctttggtcgcccggcctcagtgagcgagcgagcgcgcagagagggagtggccaactccatcactaggggttccttgtagttaatgattaacccgccatgctacttatcgcggccgcagcctgcacttagagtgtctaggtggggactttccgctggggactttccgctggggactttccgctggggactttccgctggggactttccgcaggattagtcccccagtgcacgaattccgggggaggctgctggtgaatattaaccaaggtcaccccagttatcggaggagcaaacaggggctaagtccacacgcgtggtaccgtctgtctgcacatttcgtagagcgagtgttccgatactctaatctccctaggcaaggttcatatttgtgtaggttacttattctccttttgttgactaagtcaataatcagaatcagcaggtttggagtcagcttggcagggatcagcagcctgggttggaaggagggggtataaaagccccttcaccaggagaagccgtcacacagatccacaagctcctgaagaggtaagggtttaagggatggttggttggtggggtattaatgtttaattacctggagcacctgcctgaaatcactttttttcaggttggtttaaacgccgccaccatgcaaattgagttatccacctgtttcttcctctgtctcctgaggttctgcttctctgccaccaggagatactacctgggggctgtggagctgtcctgggactacatgcagtcagacctgggggagctgccagttgatgccaggttcccccccagagtccccaagtccttccccttcaacacctcagtggtgtacaaaaagaccctgtttgtggagttcacagaccacctgttcaacatagccaagcccaggcccccctggatgggcctgctgggccccaccatccaggcagaggtttatgacacagtggtcatcaccctgaagaacatggcctcccaccctgtgtccctccatgctgtgggggtgagctactggaaggccagtgagggggcagaatatgatgaccagaccagccagagggagaaggaggatgacaaggtgttcccagggggcagccacacctatgtgtggcaggtcctgaaggagaatggccccatggcctctgaccccctctgcctcacctactcctacctgtcccatgtggacctggtgaaggacctcaactctggcctgattggagccctcctggtgtgcagggaggggagcctggccaaggaaaagacccagaccctgcacaagtttatcctgctctttgcagtctttgatgaggggaagtcctggcacagtgagaccaagaactccctgatgcaggacagagatgctgcctcagccagggcctggcccaagatgcacacagtgaatgggtatgtcaacaggagcctgccaggcctgattgggtgccacagaaagtcagtgtactggcatgtcattggcatgggcaccaccccagaggtgcactccatcttcctggagggccacaccttcctggtgaggaaccacagacaggccagcctggagatcagcccaatcaccttcctcacagcccagaccctcctcatggacctgggccagtttctcctgagctgccacatctcctcccaccagcatgatggcatggaggcctatgtgaaggtggacagctgccctgaggagccccagctcaggatgaagaacaatgaggaggcagaggactatgatgatgatctgacagactctgagatggatgtggtgagatttgatgatgacaacagcccctccttcatccagatcaggtctgtggccaagaagcaccctaagacctgggtgcactacattgcagctgaggaggaggactgggactatgcccccctggtcctggcccctgatgataggtcctacaagtcccagtacctgaacaatggcccccagaggatagggagaaagtacaagaaggtgaggttcatggcctacactgatgagaccttcaagactagggaagccatccagcatgagtctgggatcctgggccccctcctctatggggaggtgggggacaccctgctgatcatcttcaagaaccaggccagcaggccctacaacatttacccccatgggatcacagatgtgagacccctgtacagcaggagactgccaaagggggtgaagcacctgaaggacttccccatcctgccaggggagatcttcaagtacaagtggactgtgacagtggaggatgggcccaccaaatctgaccctagatgcctgaccagatactacagcagctttgtgaacatggagagggacctggcctctggactgattggccctctgctgatctgctacaaggagagtgtggaccagaggggaaaccagatcatgtctgacaagaggaatgtgatcctgttctcagtgtttgatgagaacagatcctggtacctcactgagaacatccagaggttcctgcccaacccagcaggggtgcagctggaggacccagagttccaggcctccaacatcatgcactccatcaatggctatgtctttgactccctgcagctgtcagtgtgcctgcatgaggtggcctactggtacatcctctccattggagcccagactgacttcctgtcagtcttcttcagtggctacaccttcaagcacaagatggtctatgaggacactctgaccctgttccccttctctggggagactgtgttcatgtccatggagaaccctggactgtggatcctgggctgccacaacagtgacttcaggaacaggggcatgactgccctgctgaaggtctccagctgtgacaagaacactggggactactatgaggactcctatgaggacatctctgcctacctgctgtccaagaacaatgccattgagcccaggtccttctcccagaacagcagacacccctccaccaggcagaagcagttcaatgcaaccaccatccctgaaaatgatattgagaagacagacccctggtttgctcacaggacccccatgcccaagatccagaatgtgagctcctctgacctgctgatgctgctgaggcagtctcctaccccccatgggctgtccctgagtgacctgcaggaggccaagtatgagaccttctcagatgaccccagcccaggagccattgattccaacaacagcctgtcagagatgacccacttcaggccccagctgcaccactctggggacatggtgttcacccctgagtctgggctgcagctgaggctgaatgagaagctgggcaccactgcagccacagagctcaagaagctggactttaaggtgagctccaccagcaacaacctgatcagcacaatccctagtgacaatctggctgctggcacagacaacacctcctccctgggcccccccagcatgcctgtgcactatgactcccagctggacaccaccctgtttgggaagaagtccagccccctgacagagtcagggggccccctgtccctctctgaggagaacaatgacagtaagctgctggagagtgggctgatgaactcccaggagtcctcctggggaaagaatgtctccagcagggagatcaccaggaccaccctgcagagtgaccaggaggagattgactatgatgacaccatctctgtggagatgaagaaggaggactttgacatctatgatgaggatgagaaccagagccctagaagcttccagaagaagaccagacactacttcattgctgcagtggaaagactgtgggactatgggatgagctcctccccccatgtgctgaggaacagggcccagtctggctctgtgccccagttcaagaaggtggtgttccaggagttcactgatggctccttcacccagcccctgtacaggggagagctgaatgagcacctgggcctgctgggcccctacatcagggctgaggtggaggacaatatcatggtgaccttcagaaaccaggcctccagaccttactccttctacagcagcctgatctcctatgaggaggaccagagacagggggctgagcccaggaagaactttgtgaagcccaatgagaccaagacctacttctggaaggtgcagcaccacatggcccccaccaaggatgagtttgactgcaaggcctgggcctacttctctgatgtggacctggagaaggatgtgcactctggcctgattggccccctgctggtgtgccacaccaacaccctgaaccctgcccatggcaggcaggtgactgtgcaggagtttgccctgttcttcaccatctttgatgagaccaagagctggtacttcactgagaacatggagaggaactgcagggccccctgcaacatccagatggaggaccccaccttcaaggagaactacaggttccatgccatcaatggctacatcatggacaccctgcctggcctggtgatggcccaggaccagaggatcaggtggtacctgctgagcatggggagcaatgagaacatccacagcatccacttctctggccatgtgttcacagtgaggaagaaggaggagtacaagatggccctgtacaacctgtaccctggggtgtttgagacagtggagatgctgccctccaaggctggaatctggagggtggagtgcctgattggggagcacctgcatgctggcatgagcaccctgttcctggtgtacagcaacaagtgccagacccccctgggcatggcctctggccacatcagagacttccagatcacagcctcaggccagtatggccagtgggcccccaagctggccaggctgcactactctggcagcatcaatgcctggtccaccaaggagcccttcagctggatcaaggtggacctcctggcccccatgatcatccatggcatcaagacccagggggccaggcagaagttcagctccctgtacatctcccagttcatcatcatgtactccctggatggcaagaagtggcagacctacagaggcaacagcacaggcaccctgatggtgttctttggcaatgtggacagctctgggatcaagcacaacatcttcaacccccccatcattgccaggtacatcagactgcaccccacccactactccatcaggtccaccctgagaatggagctgatgggctgtgacctgaacagctgcagcatgcccctgggcatggagagcaaggccatctctgatgcccagatcacagccagcagctacttcaccaacatgtttgccacctggtcccccagcaaggccaggctgcacctgcagggcaggagcaatgcctggaggccccaggtgaacaaccccaaggagtggctgcaggtggacttccagaagaccatgaaggtgacaggggtgaccacccagggggtgaagtccctgctgaccagcatgtatgtgaaggagttcctgatcagcagctcccaggatggccaccagtggaccctgttcttccagaatggcaaggtgaaggtgttccagggcaaccaggacagcttcacccctgtggtgaactccctggacccccccctgctgaccagatacctgaggatccacccccagtcctgggtgcaccagattgccctgagaatggaggtgctgggctgtgaggcccaggacctgtactgattaattaagagcatcttaccgccatttattcccatatttgttctgtttttcttgatttgggtatacatttaaatgttaataaaacaaaatggtggggcaatcatttacatttttagggatatgtaattactagttcaggtgtattgccacaagacaaacatgttaagaaactttcccgttatttacgctctgttcctgttaatcaacctctggattacaaaatttgtgaaagattgactgatattcttaactatgttgctccttttacgctgtgtggatatgctgctttatagcctctgtatctagctattgcttcccgtacggctttcgttttctcctccttgtataaatcctggttgctgtctcttttagaggagttgtggcccgttgtccgtcaacgtggcgtggtgtgctctgtgtttgctgacgcaacccccactggctggggcattgccaccacctgtcaactcctttctgggactttcgctttccccctcccgatcgccacggcagaactcatcgccgcctgccttgcccgctgctggacaggggctaggttgctgggcactgataattccgtggtgttgtctgtgccttctagttgccagccatctgttgtttgcccctcccccgtgccttccttgaccctggaaggtgccactcccactgtcctttcctaataaaatgaggaaattgcatcgcattgtctgagtaggtgtcattctattctggggggtggggtggggcaggacagcaagggggaggattgggaagacaatagcaggcatgctggggatgcggtgggctctatggctctagagcatggctacgtagataagtagcatggcgggttaatcattaactacacctgcaggaggaacccctagtgatggagttggccactccctctctgcgcgctcgctcgctcactgaggccgggcgaccaaaggtcgcccgacgcccgggcggcctcagtgagcgagcgagcgcgcagctgcctgcagg

SEQ ID NO: 58 - DNA, 7463 bp, Artificial Sequence
  Description of Artificial Sequence: Synthetic polynucleotide
cctgcaggcagctgcgcgctcgctcgctcactgaggccgcccgggcaaagcccgggcgtcgggcgacctttggtcgcccggcctcagtgagcgagcgagcgcgcagagagggagtggccaactccatcactaggggttccttgtagttaatgattaacccgccatgctacttatcgcggccgcaacaggttagtttgactagctggttgctgactaattgagatgcatgctttgcatacttctgcctgctggggagcctggggactttccacacctggttgctgactaattgagatgcatgctttgcatacttctgcctgctggggagcctggggactttccacaccttaagaatgtaaattctgggtggttgctgactaattgagatgcatgctttgcatacttctgcctgctggggagcctggggactttccacacctggttgctgactaattgagatgcatgctttgcatacttctgcctgctggggagcctggggactttccacacctagttacctaatttgttagatggttgctgactaattgagatgcatgctttgcatacttctgcctgctggggagcctggggactttccacacctggttgctgactaattgagatgcatgctttgcatacttctgcctgctggggagcctggggactttccacaccaatggcactcaaacagtatgtggttgctgactaattgagatgcatgctttgcatacttctgcctgctggggagcctggggactttccacacctggttgctgactaattgagatgcatgctttgcatacttctgcctgctggggagcctggggactttccacaccacttttagtcagaggttaattggttgctgactaattgagatgcatgctttgcatacttctgcctgctggggagcctggggactttccacacctggttgctgactaattgagatgcatgctttgcatacttctgcctgctggggagcctggggactttccacaccttggctcctagatcatgcacgaattccgggggaggctgctggtgaatattaaccaaggtcaccccagttatcggaggagcaaacaggggctaagtccacacgcgtggtaccgtctgtctgcacatttcgtagagcgagtgttccgatactctaatctccctaggcaaggttcatatttgtgtaggttacttattctccttttgttgactaagtcaataatcagaatcagcaggtttggagtcagcttggcagggatcagcagcctgggttggaaggagggggtataaaagccccttcaccaggagaagccgtcacacagatccacaagctcctgaagaggtaagggtttaagggatggttggttggtggggtattaatgtttaattacctggagcacctgcctgaaatcactttttttcaggttggtttaaacgccgccaccatgcaaattgagttatccacctgtttcttcctctgtctcctgaggttctgcttctctgccaccaggagatactacctgggggctgtggagctgtcctgggactacatgcagtcagacctgggggagctgccagttgatgccaggttcccccccagagtccccaagtccttccccttcaacacctcagtggtgtacaaaaagaccctgtttgtggagttcacagaccacctgttcaacatagccaagcccaggcccccctggatgggcctgctgggccccaccatccaggcagaggtttatgacacagtggtcatcaccctgaagaacatggcctcccaccctgtgtccctccatgctgtgggggtgagctactggaaggccagtgagggggcagaatatgatgaccagaccagccagagggagaaggaggatgacaaggtgttcccagggggcagccacacctatgtgtggcaggtcctgaaggagaatggccccatggcctctgaccccctctgcctcacctactcctacctgtcccatgtggacctggtgaaggacctcaactctggcctgattggagccctcctggtgtgcagggaggggagcctggccaaggaaaagacccagaccctgcacaagtttatcctgctctttgcagtctttgatgaggggaagtcctggcacagtgagaccaagaactccctgatgcaggacagagatgctgcctcagccagggcctggcccaagatgcacacagtgaatgggtatgtcaacaggagcctgccaggcctgattgggtgccacagaaagtcagtgtactggcatgtcattggcatgggcaccaccccagaggtgcactccatcttcctggagggccacaccttcctggtgaggaaccacagacaggccagcctggagatcagcccaatcaccttcctcacagcccagaccctcctcatggacctgggccagtttctcctgagctgccacatctcctcccaccagcatgatggcatggaggcctatgtgaaggtggacagctgccctgaggagccccagctcaggatgaagaacaatgaggaggcagaggactatgatgatgatctgacagactctgagatggatgtggtgagatttgatgatgacaacagcccctccttcatccagatcaggtctgtggccaagaagcaccctaagacctgggtgcactacattgcagctgaggaggaggactgggactatgcccccctggtcctggcccctgatgataggtcctacaagtcccagtacctgaacaatggcccccagaggatagggagaaagtacaagaaggtgaggttcatggcctacactgatgagaccttcaagactagggaagccatccagcatgagtctgggatcctgggccccctcctctatggggaggtgggggacaccctgctgatcatcttcaagaaccaggccagcaggccctacaacatttacccccatgggatcacagatgtgagacccctgtacagcaggagactgccaaagggggtgaagcacctgaaggacttccccatcctgccaggggagatcttcaagtacaagtggactgtgacagtggaggatgggcccaccaaatctgaccctagatgcctgaccagatactacagcagctttgtgaacatggagagggacctggcctctggactgattggccctctgctgatctgctacaaggagagtgtggaccagaggggaaaccagatcatgtctgacaagaggaatgtgatcctgttctcagtgtttgatgagaacagatcctggtacctcactgagaacatccagaggttcctgcccaacccagcaggggtgcagctggaggacccagagttccaggcctccaacatcatgcactccatcaatggctatgtctttgactccctgcagctgtcagtgtgcctgcatgaggtggcctactggtacatcctctccattggagcccagactgacttcctgtcagtcttcttcagtggctacaccttcaagcacaagatggtctatgaggacactctgaccctgttccccttctctggggagactgtgttcatgtccatggagaaccctggactgtggatcctgggctgccacaacagtgacttcaggaacaggggcatgactgccctgctgaaggtctccagctgtgacaagaacactggggactactatgaggactcctatgaggacatctctgcctacctgctgtccaagaacaatgccattgagcccaggtccttctcccagaacagcagacacccctccaccaggcagaagcagttcaatgcaaccaccatccctgaaaatgatattgagaagacagacccctggtttgctcacaggacccccatgcccaagatccagaatgtgagctcctctgacctgctgatgctgctgaggcagtctcctaccccccatgggctgtccctgagtgacctgcaggaggccaagtatgagaccttctcagatgaccccagcccaggagccattgattccaacaacagcctgtcagagatgacccacttcaggccccagctgcaccactctggggacatggtgttcacccctgagtctgggctgcagctgaggctgaatgagaagctgggcaccactgcagccacagagctcaagaagctggactttaaggtgagctccaccagcaacaacctgatcagcacaatccctagtgacaatctggctgctggcacagacaacacctcctccctgggcccccccagcatgcctgtgcactatgactcccagctggacaccaccctgtttgggaagaagtccagccccctgacagagtcagggggccccctgtccctctctgaggagaacaatgacagtaagctgctggagagtgggctgatgaactcccaggagtcctcctggggaaagaatgtctccagcagggagatcaccaggaccaccctgcagagtgaccaggaggagattgactatgatgacaccatctctgtggagatgaagaaggaggactttgacatctatgatgaggatgagaaccagagccctagaagcttccagaagaagaccagacactacttcattgctgcagtggaaagactgtgggactatgggatgagctcctccccccatgtgctgaggaacagggcccagtctggctctgtgccccagttcaagaaggtggtgttccaggagttcactgatggctccttcacccagcccctgtacaggggagagctgaatgagcacctgggcctgctgggcccctacatcagggctgaggtggaggacaatatcatggtgaccttcagaaaccaggcctccagaccttactccttctacagcagcctgatctcctatgaggaggaccagagacagggggctgagcccaggaagaactttgtgaagcccaatgagaccaagacctacttctggaaggtgcagcaccacatggcccccaccaaggatgagtttgactgcaaggcctgggcctacttctctgatgtggacctggagaaggatgtgcactctggcctgattggccccctgctggtgtgccacaccaacaccctgaaccctgcccatggcaggcaggtgactgtgcaggagtttgccctgttcttcaccatctttgatgagaccaagagctggtacttcactgagaacatggagaggaactgcagggccccctgcaacatccagatggaggaccccaccttcaaggagaactacaggttccatgccatcaatggctacatcatggacaccctgcctggcctggtgatggcccaggaccagaggatcaggtggtacctgctgagcatggggagcaatgagaacatccacagcatccacttctctggccatgtgttcacagtgaggaagaaggaggagtacaagatggccctgtacaacctgtaccctggggtgtttgagacagtggagatgctgccctccaaggctggaatctggagggtggagtgcctgattggggagcacctgcatgctggcatgagcaccctgttcctggtgtacagcaacaagtgccagacccccctgggcatggcctctggccacatcagagacttccagatcacagcctcaggccagtatggccagtgggcccccaagctggccaggctgcactactctggcagcatcaatgcctggtccaccaaggagcccttcagctggatcaaggtggacctcctggcccccatgatcatccatggcatcaagacccagggggccaggcagaagttcagctccctgtacatctcccagttcatcatcatgtactccctggatggcaagaagtggcagacctacagaggcaacagcacaggcaccctgatggtgttctttggcaatgtggacagctctgggatcaagcacaacatcttcaacccccccatcattgccaggtacatcagactgcaccccacccactactccatcaggtccaccctgagaatggagctgatgggctgtgacctgaacagctgcagcatgcccctgggcatggagagcaaggccatctctgatgcccagatcacagccagcagctacttcaccaacatgtttgccacctggtcccccagcaaggccaggctgcacctgcagggcaggagcaatgcctggaggccccaggtgaacaaccccaaggagtggctgcaggtggacttccagaagaccatgaaggtgacaggggtgaccacccagggggtgaagtccctgctgaccagcatgtatgtgaaggagttcctgatcagcagctcccaggatggccaccagtggaccctgttcttccagaatggcaaggtgaaggtgttccagggcaaccaggacagcttcacccctgtggtgaactccctggacccccccctgctgaccagatacctgaggatccacccccagtcctgggtgcaccagattgccctgagaatggaggtgctgggctgtgaggcccaggacctgtactgattaattaagagcatcttaccgccatttattcccatatttgttctgtttttcttgatttgggtatacatttaaatgttaataaaacaaaatggtggggcaatcatttacatttttagggatatgtaattactagttcaggtgtattgccacaagacaaacatgttaagaaactttcccgttatttacgctctgttcctgttaatcaacctctggattacaaaatttgtgaaagattgactgatattcttaactatgttgctccttttacgctgtgtggatatgctgctttatagcctctgtatctagctattgcttcccgtacggctttcgttttctcctccttgtataaatcctggttgctgtctcttttagaggagttgtggcccgttgtccgtcaacgtggcgtggtgtgctctgtgtttgctgacgcaacccccactggctggggcattgccaccacctgtcaactcctttctgggactttcgctttccccctcccgatcgccacggcagaactcatcgccgcctgccttgcccgctgctggacaggggctaggttgctgggcactgataattccgtggtgttgtctgtgccttctagttgccagccatctgttgtttgcccctcccccgtgccttccttgaccctggaaggtgccactcccactgtcctttcctaataaaatgaggaaattgcatcgcattgtctgagtaggtgtcattctattctggggggtggggtggggcaggacagcaagggggaggattgggaagacaatagcaggcatgctggggatgcggtgggctctatggctctagagcatggctacgtagataagtagcatggcgggttaatcattaactacacctgcaggaggaacccctagtgatggagttggccactccctctctgcgcgctcgctcgctcactgaggccgggcgaccaaaggtcgcccgacgcccgggcggcctcagtgagcgagcgagcgcgcagctgcctgcagg

SEQ ID NO: 59 - DNA, 7403 bp, Artificial Sequence
  Description of Artificial Sequence: Synthetic polynucleotide
cctgcaggcagctgcgcgctcgctcgctcactgaggccgcccgggcaaagcccgggcgtcgggcgacctttggtcgcccggcctcagtgagcgagcgagcgcgcagagagggagtggccaactccatcactaggggttccttgtagttaatgattaacccgccatgctacttatcgcggccgccgggggaggctgctggtgaatattaaccaaggtcaccccagttatcggaggagcaaacaggggctaagtccacacgcgtggtaccgtctgtctgcacatttcgtagagcgagtgttccgatactctaatctccctaggcaaggttcatatttgtgtaggttacttattctccttttgttgactaagtcaataatcagaatcagcaggtttggagtcagcttggcagggatcagcagcctgggttggaaggagggggtataaaagccccttcaccaggagaagccgtcacacagatccacaagctcctgaagaggtaagggtttaagggatggttggttggtggggtattaatgtttaattacctggagcacctgcctgaaatcactttttttcaggttggtttaaacgggacatcgtagagagtcgtacttacatttcgtgggctaagtttaagctactctcgctccgggataagagtttcaatgcagattgagctgagcacctgcttcttcctgtgcctgctgaggttctgcttctctgccaccaggagatactacctgggggctgtggagctgagctgggactacatgcagtctgacctgggggagctgcctgtggatgccaggttcccccccagagtgcccaagagcttccccttcaacacctctgtggtgtacaagaagaccctgtttgtggagttcactgaccacctgttcaacattgccaagcccaggcccccctggatgggcctgctgggccccaccatccaggctgaggtgtatgacactgtggtgatcaccctgaagaacatggccagccaccctgtgagcctgcatgctgtgggggtgagctactggaaggcctctgagggggctgagtatgatgaccagaccagccagagggagaaggaggatgacaaggtgttccctgggggcagccacacctatgtgtggcaggtgctgaaggagaatggccccatggcctctgaccccctgtgcctgacctacagctacctgagccatgtggacctggtgaaggacctgaactctggcctgattggggccctgctggtgtgcagggagggcagcctggccaaggagaagacccagaccctgcacaagttcatcctgctgtttgctgtgtttgatgagggcaagagctggcactctgaaaccaagaacagcctgatgcaggacagggatgctgcctctgccagggcctggcccaagatgcacactgtgaatggctatgtgaacaggagcctgcctggcctgattggctgccacaggaagtctgtgtactggcatgtgattggcatgggcaccacccctgaggtgcacagcatcttcctggagggccacaccttcctggtcaggaaccacaggcaggccagcctggagatcagccccatcaccttcctgactgcccagaccctgctgatggacctgggccagttcctgctgagctgccacatcagcagccaccagcatgatggcatggaggcctatgtgaaggtggacagctgccctgaggagccccagctgaggatgaagaacaatgaggaggctgaggactatgatgatgacctgactgactctgagatggatgtggtgaggtttgatgatgacaacagccccagcttcatccagatcaggtctgtggccaagaagcaccccaagacctgggtgcactacattgctgctgaggaggaggactgggactatgcccccctggtgctggcccctgatgacaggagctacaagagccagtacctgaacaatggcccccagaggattggcaggaagtacaagaaggtcaggttcatggcctacactgatgaaaccttcaagaccagggaggccatccagcatgagtctggcatcctgggccccctgctgtatggggaggtgggggacaccctgctgatcatcttcaagaaccaggccagcaggccctacaacatctacccccatggcatcactgatgtgaggcccctgtacagcaggaggctgcccaagggggtgaagcacctgaaggacttccccatcctgcctggggagatcttcaagtacaagtggactgtgactgtggaggatggccccaccaagtctgaccccaggtgcctgaccagatactacagcagctttgtgaacatggagagggacctggcctctggcctgattggccccctgctgatctgctacaaggagtctgtggaccagaggggcaaccagatcatgtctgacaagaggaatgtgatcctgttctctgtgtttgatgagaacaggagctggtacctgactgagaacatccagaggttcctgcccaaccctgctggggtgcagctggaggaccctgagttccaggccagcaacatcatgcacagcatcaatggctatgtgtttgacagcctgcagctgtctgtgtgcctgcatgaggtggcctactggtacatcctgagcattggggcccagactgacttcctgtctgtgttcttctctggctacaccttcaagcacaagatggtgtatgaggacaccctgaccctgttccccttctctggggagactgtgttcatgagcatggagaaccctggcctgtggattctgggctgccacaactctgacttcaggaacaggggcatgactgccctgctgaaagtctccagctgtgacaagaacactggggactactatgaggacagctatgaggacatctctgcctacctgctgagcaagaacaatgccattgagcccaggagcttcagccagaatagcaggcaccccagcaccaggcagaagcagttcaatgccaccaccatcccagagaatgatattgagaagactgacccttggtttgcccacaggacccccatgccaaagattcagaatgtgtcctcatctgacttgctgatgctgctgaggcagagccccacaccccatgggctgagcctgtctgacctgcaggaggccaaatatgaaaccttttcagatgaccccagcccaggagccattgacagtaacaacagcctgtctgagatgacccacttcaggccccagctccatcactctggggacatggtgttcaccccagagtcaggcctgcagctgaggctgaatgagaagctgggcaccacagcagccactgagctgaagaagctggactttaaggtgtccagcacctccaacaacctgatcagcaccatcccctctgacaacctggcagctggcactgataacacctccagcctgggcccaccttctatgcctgtgcactatgacagccaactggacaccaccctgtttgggaagaagtcctctccactgacagagtctggagggcccctgtccctgtctgaggagaacaatgactccaagctgctggagtctgggctgatgaacagtcaggagagctcctggggaaagaatgtgtccagcagggagatcaccaggaccaccctgcagtctgaccaggaggagattgactatgatgacaccatctctgtggagatgaagaaggaggactttgacatctacgacgaggacgagaaccagagccccaggagcttccagaagaagaccaggcactacttcattgctgctgtggagaggctgtgggactatggcatgagcagcagcccccatgtgctgaggaacagggcccagtctggctctgtgccccagttcaagaaggtggtgttccaggagttcactgatggcagcttcacccagcccctgtacagaggggagctgaatgagcacctgggcctgctgggcccctacatcagggctgaggtggaggacaacatcatggtgaccttcaggaaccaggccagcaggccctacagcttctacagcagcctgatcagctatgaggaggaccagaggcagggggctgagcccaggaagaactttgtgaagcccaatgaaaccaagacctacttctggaaggtgcagcaccacatggcccccaccaaggatgagtttgactgcaaggcctgggcctacttctctgatgtggacctggagaaggatgtgcactctggcctgattggccccctgctggtgtgccacaccaacaccctgaaccctgcccatggcaggcaggtgactgtgcaggagtttgccctgttcttcaccatctttgatgaaaccaagagctggtacttcactgagaacatggagaggaactgcagggccccctgcaacatccagatggaggaccccaccttcaaggagaactacaggttccatgccatcaatggctacatcatggacaccctgcctggcctggtgatggcccaggaccagaggatcaggtggtacctgctgagcatgggcagcaatgagaacatccacagcatccacttctctggccatgtgttcactgtgaggaagaaggaggagtacaagatggccctgtacaacctgtaccctggggtgtttgagactgtggagatgctgcccagcaaggctggcatctggagggtggagtgcctgattggggagcacctgcatgctggcatgagcaccctgttcctggtgtacagcaacaagtgccagacccccctgggcatggcctctggccacatcagggacttccagatcactgcctctggccagtatggccagtgggcccccaagctggccaggctgcactactctggcagcatcaatgcctggagcaccaaggagcccttcagctggatcaaggtggacctgctggcccccatgatcatccatggcatcaagacccagggggccaggcagaagttcagcagcctgtacatcagccagttcatcatcatgtacagcctggatggcaagaagtggcagacctacaggggcaacagcactggcaccctgatggtgttctttggcaatgtggacagctctggcatcaagcacaacatcttcaacccccccatcattgccagatacatcaggctgcaccccacccactacagcatcaggagcaccctgaggatggagctgatgggctgtgacctgaacagctgcagcatgcccctgggcatggagagcaaggccatctctgatgcccagatcactgccagcagctacttcaccaacatgtttgccacctggagccccagcaaggccaggctgcacctgcagggcaggagcaatgcctggaggccccaggtcaacaaccccaaggagtggctgcaggtggacttccagaagaccatgaaggtgactggggtgaccacccagggggtgaagagcctgctgaccagcatgtatgtgaaggagttcctgatcagcagcagccaggatggccaccagtggaccctgttcttccagaatggcaaggtgaaggtgttccagggcaaccaggacagcttcacccctgtggtgaacagcctggacccccccctgctgaccagatacctgaggattcacccccagagctgggtgcaccagattgccctgaggatggaggtgctgggctgtgaggcccaggacctgtactgattaattaagagcatcttaccgccatttattcccatatttgttctgtttttcttgatttgggtatacatttaaatgttaataaaacaaaatggtggggcaatcatttacatttttagggatatgtaattactagttcaggtgtattgccacaagacaaacatgttaagaaactttcccgttatttacgctctgttcctgttaatcaacctctggattacaaaatttgtgaaagattgactgatattcttaactatgttgctccttttacgctgtgtggatatgctgctttatagcctctgtatctagctattgcttcccgtacggctttcgttttctcctccttgtataaatcctggttgctgtctcttttagaggagttgtggcccgttgtccgtcaacgtggcgtggtgtgctctgtgtttgctgacgcaacccccactggctggggcattgccaccacctgtcaactcctttctgggactttcgctttccccctcccgatcgccacggcagaactcatcgccgcctgccttgcccgctgctggacaggggctaggttgctgggcactgataattccgtggtgttgtctgtgccttctagttgccagccatctgttgtttgcccctcccccgtgccttccttgaccctggaaggtgccactcccactgtcctttcctaataaaatgaggaaattgcatcgcattgtctgagtaggtgtcattctattctggggggtggggtggggcaggacagcaagggggaggattgggaagacaatagcaggcatgctggggatgcggtgggctctatggccttaagaacaggttagtttgactagcgggaggtggtccctgcagttacgccaatgataacccccgccagaaaaatcttagtagccttccctttttgttttccgtgccccaactcggcggattgactcggccccttccggaaacacccgaatcaacttctagtcaaattattgttcacgccgcaatgacccacccctggcccgcgtctgtggaactgacccctggtgtacaggagagttcgctgctgaaagtggtcccaaaggggtactagtttttaagctcccaactccccctcccccagcgtctggaggattccacaccctcgcaccgcaggggcgaggaagtgggcggagtccggttttggcgccagccgctgaggctgccaagcagaaaagccaccgctgaggagactccggtcactgtcctcgccccgcctcccccttccctccccttggggaccaccgggcgccacgccgcgaacgttaagtgccgcggtcgtcggcgcctccgccctcccccttgggccccaattcccagcgggcgcggcgcgcggcccctccccccgccgggcgcgcgcccgctgccccgcccttcgtggccgcccggcgtgggcggtgccacccctccccccggcggccccgcgcgcagctcccggctccctcccccttcggatgtggcttgagctgtaggcgcggagggccagagacttcacaacctagtttctagagcatggctacgtagataagtagcatggcgggttaatcattaactacacctgcaggaggaacccctagtgatggagttggccactccctctctgcgcgctcgctcgctcactgaggccgggcgaccaaaggtcgcccgacgcccgggcggcctcagtgagcgagcgagcgcgcagctgcctgcagg

SEQ ID NO: 60 - DNA, 6316 bp, Artificial Sequence
  Description of Artificial Sequence: Synthetic polynucleotide
cctgcaggcagctgcgcgctcgctcgctcactgaggccgcccgggcaaagcccgggcgtcgggcgacctttggtcgcccggcctcagtgagcgagcgagcgcgcagagagggagtggccaactccatcactaggggttccttgtagttaatgattaacccgccatgctacttatcgcggccgcgggggaggctgctggtgaatattaaccaaggtcaccccagttatcggaggagcaaacaggggctaagtccaccgggggaggctgctggtgaatattaaccaaggtcaccccagttatcggaggagcaaacaggggctaagtccaccgggggaggctgctggtgaatattaaccaaggtcaccccagttatcggaggagcaaacaggggctaagtccacggtacccactgggaggatgttgagtaagatggaaaactactgatgacccttgcagagacagagtattaggacatgtttgaacaggggccgggcgatcagcaggtagctctagaggatccccgtctgtctgcacatttcgtagagcgagtgttccgatactctaatctccctaggcaaggttcatatttgtgtaggttacttattctccttttgttgactaagtcaataatcagaatcagcaggtttggagtcagcttggcagggatcagcagcctgggttggaaggagggggtataaaagccccttcaccaggagaagccgtcacacagatccacaagctcctgaagaggtaagggtttaagggatggttggttggtggggtattaatgtttaattacctggagcacctgcctgaaatcactttttttcaggttggtttaaacgggacatcgtagagagtcgtacttacatttcgtgggctaagtttaagctactctcgctccgggataagagtttcaatgcagattgagctgagcacctgtttcttcctgtgccttctgaggttctgcttcagtgccaccaggaggtactacctgggggcagtggagctgagctgggactacatgcagtctgacctgggtgagctgcctgtggatgccaggttcccccccagagtgcctaagagcttccccttcaacacctctgtggtgtacaagaagacactgtttgtggagttcacagaccacctgttcaacattgccaagcccaggcctccctggatggggctgctgggccccactatccaggcagaggtgtatgacactgtggtcatcactctgaagaacatggccagtcaccctgtgagcctgcatgcagtgggggtgagctactggaaggcctctgagggggctgagtatgatgaccagacctctcagagggagaaggaggatgacaaggtgttccctgggggcagccacacctatgtgtggcaggtgctgaaggagaatggccccatggccagtgaccccctgtgcctgacctacagctacctgagccatgtggatctggtgaaggacctgaactcaggcctgataggggccctgctggtgtgcagggagggcagcctggccaaggagaagacccagaccttgcacaagttcatcctgctgtttgctgtgtttgatgaggggaagtcctggcactcagagaccaagaacagcctgatgcaggacagggatgctgcctctgccagggcctggcccaagatgcacacagtgaatggctatgtgaacaggtcactgccaggcctgattggctgccacaggaagtcagtgtactggcatgtgattggcatgggcaccacccctgaggtgcacagcatctttctggagggccacaccttcctggtgaggaaccacaggcaggccagcctggagatctctccaatcacattcctcactgcccagaccctgctgatggatctgggccagttcctgctgttctgccacatcagcagccaccagcatgatggcatggaggcctatgtgaaggtggacagctgtccagaggagccacagctgaggatgaagaacaatgaggaggctgaggattatgatgatgacctgactgactctgagatggatgtggtcaggtttgatgatgacaacagcccctccttcatccagatcaggtcagtggccaagaagcaccctaagacctgggtgcactacattgctgctgaggaggaggactgggactatgcccccctggtgctggctcctgatgacaggagctacaagagccagtacctcaataatggcccccagaggattggcaggaagtacaagaaggtgaggttcatggcctacactgatgagactttcaagaccagggaggccatccagcatgagtctggcatcctgggccccctgctgtatggggaggtgggggacaccctgctgatcatcttcaagaatcaggcctccaggccttacaacatctatccccatgggatcactgatgtgaggcctctgtacagcaggaggctgcccaagggtgtgaagcatctgaaggattttcccatcctccctggtgagatcttcaagtacaagtggactgtgactgtggaggatggccccaccaagtcagatcccaggtgcctcaccagatactacagcagctttgtgaacatggagagggacttggccagtggcctgattgggcccctgctgatctgctacaaggagtcagtggatcagaggggcaatcagatcatgtctgataagaggaatgtgatcctgttctcagtgtttgatgagaacaggagctggtacctgactgagaacattcagaggttcctgcccaatccagctggggtgcagctggaggatcctgagttccaggcttccaacatcatgcacagcatcaatggctatgtgtttgacagcctgcagctgtcagtgtgcctgcatgaggtggcctactggtacattctgagcattggggcacagacagacttcctgtctgtgttcttctctggttacaccttcaagcacaagatggtgtatgaggacaccctcactctgtttcccttttctggtgagactgtgttcatgagcatggagaatcctggcctgtggatcctgggctgtcacaacagtgacttcaggaataggggcatgacagccctcctgaaggtctccagctgtgacaagaacactggagactactatgaggacagctatgaggacatctctgcctacctgctgtccaagaataatgccatagagcccaggtccttcagccagaattctaggcacccaagtaccaggcagaagcagttcaatgccaccaccatccctgagaacaccacactgcagtctgaccaggaggagatagactatgatgacaccatctctgtggagatgaagaaggaggactttgacatctatgatgaggatgagaaccagagccccaggagcttccagaagaagaccaggcactacttcattgctgctgtggagaggctgtgggactatggcatgagcagctcacctcatgtgctgaggaacagagcccagtctggctctgttcctcagttcaagaaggtggtgttccaggagttcactgatgggtccttcacccagcccctgtacaggggtgagctgaatgagcacctggggctgctgggcccctacatcagggctgaggtggaggacaacatcatggtgaccttcaggaaccaggccagcaggccctacagcttctacagcagcctgatctcctatgaggaggatcagaggcagggggctgagccaaggaagaactttgtgaagcccaatgagaccaagacctacttctggaaggtgcagcaccacatggcccccaccaaggatgaatttgattgcaaggcctgggcctacttctctgatgtggatctggagaaggatgtgcacagtgggctgattggcccactgctggtgtgccacaccaacaccctgaaccctgcccatggcaggcaggtgacagtgcaggagtttgccctgttcttcaccatctttgatgagaccaagagctggtacttcacagagaacatggagaggaactgcagggccccctgcaacatccagatggaggaccccaccttcaaggagaactacaggttccatgccatcaatggctacatcatggatactctgcctgggctggtcatggcccaggaccagaggatcagatggtacctgctgagcatgggcagcaatgagaacatccacagcatccacttcagtggccatgtgttcactgtgagaaagaaggaggaatacaagatggccctgtacaacctgtaccctggagtgtttgagactgtggagatgctgcccagcaaggcaggtatctggagggtggagtgcctgattggagagcacctccatgcaggcatgtccaccctgttcctggtgtacagcaacaagtgccagacccccctgggcatggcatctggccacatcagggacttccagatcacagcctctggccagtatggccagtgggcccccaagctggccaggctgcactactctggcagcatcaatgcctggagcacaaaggagcccttcagctggatcaaggtggacctgctggcccccatgatcatccatgggatcaagacccagggtgccaggcagaagttcagctccctgtatatcagccagttcatcatcatgtacagtctggatggcaagaagtggcagacctacaggggcaactctactggcaccctgatggtgttctttggcaatgtggactccagtggcattaagcacaacatcttcaatccacccatcattgccagatacatcaggctgcaccccacccactacagcatcaggtccaccctgaggatggagctgatggggtgtgacctgaatagctgtagtatgcccctgggcatggagagcaaggccatctctgatgcccagatcactgccagcagctacttcaccaatatgtttgccacctggagcccctcaaaggccaggctgcatctgcagggcaggagcaatgcctggaggccccaggtgaacaaccccaaggagtggctgcaggtggacttccagaagaccatgaaggtcactggagtgaccacccagggggtgaagagcctcctgaccagcatgtatgtgaaggagttcctgatcagcagcagccaggatgggcaccagtggaccctgttcttccagaatgggaaggtgaaggtgttccagggcaaccaggacagcttcaccccagtggtgaacagcctggaccctcccctgctgaccagatatctgaggatccaccctcagagctgggtgcaccagattgccctgaggatggaggtcctgggctgtgaggcccaggacctctactgattaattaagagcatcttaccgccatttattcccatatttgttctgtttttcttgatttgggtatacatttaaatgttaataaaacaaaatggtggggcaatcatttacatttttagggatatgtaattactagttcaggtgtattgccacaagacaaacatgttaagaaactttcccgttatttacgctctgttcctgttaatcaacctctggattacaaaatttgtgaaagattgactgatattcttaactatgttgctccttttacgctgtgtggatatgctgctttatagcctctgtatctagctattgcttcccgtacggctttcgttttctcctccttgtataaatcctggttgctgtctcttttagaggagttgtggcccgttgtccgtcaacgtggcgtggtgtgctctgtgtttgctgacgcaacccccactggctggggcattgccaccacctgtcaactcctttctgggactttcgctttccccctcccgatcgccacggcagaactcatcgccgcctgccttgcccgctgctggacaggggctaggttgctgggcactgataattccgtggtgttgtctgtgccttctagttgccagccatctgttgtttgcccctcccccgtgccttccttgaccctggaaggtgccactcccactgtcctttcctaataaaatgaggaaattgcatcgcattgtctgagtaggtgtcattctattctggggggtggggtggggcaggacagcaagggggaggattgggaagacaatagcaggcatgctggggatgcggtgggctctatggctctagagcatggctacgtagataagtagcatggcgggttaatcattaactacacctgcaggaggaacccctagtgatggagttggccactccctctctgcgcgctcgctcgctcactgaggccgggcgaccaaaggtcgcccgacgcccgggcggcctcagtgagcgagcgagcgcgcagctgcctgcagg

SEQ ID NO: 61 - DNA, 6316 bp, Artificial Sequence
  Description of Artificial Sequence: Synthetic polynucleotide
cctgcaggcagctgcgcgctcgctcgctcactgaggccgcccgggcaaagcccgggcgtcgggcgacctttggtcgcccggcctcagtgagcgagcgagcgcgcagagagggagtggccaactccatcactaggggttccttgtagttaatgattaacccgccatgctacttatcgcggccgcgggggaggctgctggtgaatattaaccaaggtcaccccagttatcggaggagcaaacaggggctaagtccaccgggggaggctgctggtgaatattaaccaaggtcaccccagttatcggaggagcaaacaggggctaagtccaccgggggaggctgctggtgaatattaaccaaggtcaccccagttatcggaggagcaaacaggggctaagtccacggtacccactgggaggatgttgagtaagatggaaaactactgatgacccttgcagagacagagtattaggacatgtttgaacaggggccgggcgatcagcaggtagctctagaggatccccgtctgtctgcacatttcgtagagcgagtgttccgatactctaatctccctaggcaaggttcatatttgtgtaggttacttattctccttttgttgactaagtcaataatcagaatcagcaggtttggagtcagcttggcagggatcagcagcctgggttggaaggagggggtataaaagccccttcaccaggagaagccgtcacacagatccacaagctcctgaagaggtaagggtttaagggatggttggttggtggggtattaatgtttaattacctggagcacctgcctgaaatcactttttttcaggttggtttaaacgggacatcgtagagagtcgtacttacatttcgtgggctaagtttaagctactctcgctccgggataagagtttcaatgcagattgagctgtcaacctgcttcttcctgtgcctgctgaggttctgcttcagtgccaccaggagatactacctgggggctgtggagctgagctgggactacatgcagtctgacttgggggagctgcctgtggatgccaggtttcccccaagagtgcctaagagcttccccttcaacacctctgtggtgtacaagaagaccctgtttgtggagttcacagaccacctcttcaacattgccaagcctaggcccccctggatgggcctgctgggccccaccatccaggctgaggtgtatgatacagtggtcatcacactgaagaacatggccagccaccctgtcagcctgcatgctgtgggggtgtcctactggaaggcctctgagggggctgagtatgatgaccagacctcacagagggagaaggaggatgacaaggtgttccctgggggcagccacacctatgtgtggcaggtgctgaaggaaaatggccccatggcctctgaccccctgtgcctcacctacagctacctgagccatgtggacttggtgaaggacctgaactctggcctcattggggccctgctggtgtgcagggagggctctctggccaaggagaagacccaaaccctgcacaagttcatcctgctgtttgctgtttttgatgagggcaagagctggcactctgagaccaagaacagcctgatgcaggacagggatgctgcatctgccagggcctggccaaagatgcacacagtgaatgggtatgtgaacaggagcctgcctggcctgattggctgccacaggaagtctgtgtactggcatgtgattgggatgggcaccactcctgaggtgcacagcatcttcttggaggggcacaccttcctggtgaggaatcacaggcaggccagcctggagatcagtcccatcacattcctgacagcccagaccctgctgatggatctgggccagttcctgctgttctgccacatctccagccaccagcatgatggcatggaggcttatgtgaaggtggacagctgcccagaggagccccagctgaggatgaagaacaatgaggaggctgaggattatgatgatgacctcacagactctgagatggatgtggtgaggtttgatgatgacaacagccccagcttcatccagatcaggtctgtggccaagaagcaccccaagacctgggtgcactacattgctgctgaggaggaggactgggactatgcacccctggtgctagccccagatgacaggtcctacaagagccagtacctgaacaatggcccccagaggattggcaggaagtataagaaggtgaggttcatggcctacacagatgagaccttcaaaaccagggaggccatacagcatgagtctggcattctgggacccctgctgtatggggaggtgggggacaccctgctgatcatcttcaagaaccaggccagcaggccctacaacatctacccccatggcatcacagatgtgaggcccctgtatagcaggaggctgccaaagggggtgaagcacctcaaggacttccccatcctgcctggtgaaatcttcaagtacaagtggacagtgacagtggaggatgggcccaccaagtcagaccccaggtgcctgaccagatactacagtagctttgtgaacatggagagggacctggcctctggcctgattgggcccctgctgatctgctacaaggagtctgtagaccagaggggcaatcagatcatgtctgacaagaggaatgtcatcctgttctctgtgtttgatgagaacaggagctggtacctgacagagaatatccagagattcctgcccaaccctgctggggtgcagctggaggaccctgagttccaggccagcaacatcatgcacagcatcaatggctatgtgtttgacagtcttcagctgtctgtgtgcctgcatgaggtggcctattggtacatccttagcattggggcccagacagacttcctctctgtgttcttttctggctacaccttcaagcacaagatggtgtatgaggataccctgaccctgttccccttctctggggagacagtgttcatgagcatggagaaccctggcttatggatactgggctgccataactctgacttcaggaacagggggatgacagccctgctgaaggtgtcaagctgtgacaagaacacaggggactactatgaggacagctatgaggacatatcagcctacctgctgagcaagaacaatgccattgagcccaggagcttcagccagaactccaggcaccccagcaccaggcagaagcagttcaatgccaccaccatccctgaaaataccaccctgcagtctgaccaggaggagattgactatgatgataccatctctgtggagatgaagaaggaggattttgacatctatgatgaggatgagaatcagagccctaggagcttccagaagaagaccaggcactacttcattgctgctgtggaaaggctgtgggactatggcatgagcagcagccctcatgtgctgaggaacagggcccagtctgggtctgtgccccagttcaagaaggtggtgttccaggagttcacagatggcagcttcacccagcccctgtacagaggggagctgaatgagcacctgggcctccttgggccctacatcagggctgaggtggaggacaacatcatggtgaccttcaggaaccaggccagcaggccctacagcttctacagcagcctaatcagctatgaggaggaccagaggcagggggctgagccaaggaagaactttgtgaagcccaatgaaaccaagacctacttctggaaggtgcagcatcacatggcccctaccaaggatgagtttgactgcaaggcctgggcctacttctctgatgtggacttggagaaggatgtgcactctggcctgattgggcccctgctggtgtgccacaccaacaccctgaaccctgcccatggcaggcaggtgacagtgcaggagtttgccctgttcttcaccatctttgatgagaccaagagctggtactttacagagaacatggagaggaactgcagggccccctgcaacatccagatggaggaccccaccttcaaagagaattacaggttccatgccatcaatggctacatcatggacactctgcctggcctggtcatggcccaggatcagaggatcaggtggtatctgcttagcatgggcagcaatgagaacatccacagcatccacttctctggccatgtgttcacagtgagaaagaaggaggaatacaagatggccctgtataacctgtaccctggggtgtttgagacagtggagatgctgcccagcaaggctggcatctggagggtggaatgcctgattggggagcacctgcatgcaggcatgtctaccctgttcctggtgtacagcaacaagtgccagacccccctgggcatggcatctgggcacatcagggacttccagattacagcctctgggcagtatggccagtgggcacccaagctggccaggctgcactattctggcagcatcaatgcctggagcaccaaggagcccttcagctggataaaggtggacctgctggcccccatgatcattcatggcatcaagacccagggggccaggcagaagttcagcagcctgtacatcagccagttcatcatcatgtactctctggatggcaagaagtggcagacctacagggggaatagcacagggaccctgatggtgttctttggcaatgtggacagctctggcatcaagcacaatatcttcaacccccccatcatagccagatacatcaggctgcaccctacccattacagcatcaggtccaccctgaggatggagctgatgggctgtgatctgaacagctgctccatgcccctgggcatggagagcaaggccatctctgatgcccagatcacagccagcagctacttcaccaatatgtttgccacctggagccccagcaaggcaaggctgcacttgcagggcaggtccaatgcctggaggccccaggtaaacaaccccaaggagtggctgcaggtggactttcagaagaccatgaaggtgacaggggtgaccacccagggggtgaagagcctgctgaccagcatgtatgtgaaggagttcttgatcagcagcagccaggatggccaccagtggaccctgttcttccagaatgggaaggtgaaggtgttccagggcaaccaggacagcttcacccctgtggtgaacagcctggacccccccctgctgaccagatatctgaggatccatccccagagctgggtgcaccagattgctctgaggatggaggttctgggctgtgaagcccaggacctgtactgattaattaagagcatcttaccgccatttattcccatatttgttctgtttttcttgatttgggtatacatttaaatgttaataaaacaaaatggtggggcaatcatttacatttttagggatatgtaattactagttcaggtgtattgccacaagacaaacatgttaagaaactttcccgttatttacgctctgttcctgttaatcaacctctggattacaaaatttgtgaaagattgactgatattcttaactatgttgctccttttacgctgtgtggatatgctgctttatagcctctgtatctagctattgcttcccgtacggctttcgttttctcctccttgtataaatcctggttgctgtctcttttagaggagttgtggcccgttgtccgtcaacgtggcgtggtgtgctctgtgtttgctgacgcaacccccactggctggggcattgccaccacctgtcaactcctttctgggactttcgctttccccctcccgatcgccacggcagaactcatcgccgcctgccttgcccgctgctggacaggggctaggttgctgggcactgataattccgtggtgttgtctgtgccttctagttgccagccatctgttgtttgcccctcccccgtgccttccttgaccctggaaggtgccactcccactgtcctttcctaataaaatgaggaaattgcatcgcattgtctgagtaggtgtcattctattctggggggtggggtggggcaggacagcaagggggaggattgggaagacaatagcaggcatgctggggatgcggtgggctctatggctctagagcatggctacgtagataagtagcatggcgggttaatcattaactacacctgcaggaggaacccctagtgatggagttggccactccctctctgcgcgctcgctcgctcactgaggccgggcgaccaaaggtcgcccgacgcccgggcggcctcagtgagcgagcgagcgcgcagctgcctgcagg

SEQ ID NO: 62 - DNA, 6251 bp, Artificial Sequence
  Description of Artificial Sequence: Synthetic polynucleotide
cctgcaggcagctgcgcgctcgctcgctcactgaggccgcccgggcaaagcccgggcgtcgggcgacctttggtcgcccggcctcagtgagcgagcgagcgcgcagagagggagtggccaactccatcactaggggttccttgtagttaatgattaacccgccatgctacttatcgcggccgcgggggaggctgctggtgaatattaaccaaggtcaccccagttatcggaggagcaaacaggggctaagtccaccgggggaggctgctggtgaatattaaccaaggtcaccccagttatcggaggagcaaacaggggctaagtccaccgggggaggctgctggtgaatattaaccaaggtcaccccagttatcggaggagcaaacaggggctaagtccacggtacccactgggaggatgttgagtaagatggaaaactactgatgacccttgcagagacagagtattaggacatgtttgaacaggggccgggcgatcagcaggtagcactagaggatccccgtctgtctgcacatttcgtagagcgagtgttccgatactctaatctccctaggcaaggttcatatttgtgtaggttacttattctccttttgttgactaagtcaataatcagaatcagcaggtttggagtcagcttggcagggatcagcagcctgggttggaaggagggggtataaaagccccttcaccaggagaagccgtcacacagatccacaagctcctgaagaggtaagggtttaagggatggttggttggtggggtattaatgtttaattacctggagcacctgcctgaaatcactttttttcaggttgggtttaaacgccgccaccatgcaaattgagttatccacctgtttcttcctctgtctcctgaggttctgcttctctgccaccaggagatactacctgggggctgtggagctgtcctgggactacatgcagtcagacctgggggagctgccagttgatgccaggttcccccccagagtccccaagtccttccccttcaacacctcagtggtgtacaaaaagaccctgtttgtggagttcacagaccacctgttcaacatagccaagcccaggcccccctggatgggcctgctgggccccaccatccaggcagaggtttatgacacagtggtcatcaccctgaagaacatggcctcccaccctgtgtccctccatgctgtgggggtgagctactggaaggccagtgagggggcagaatatgatgaccagaccagccagagggagaaggaggatgacaaggtgttcccagggggcagccacacctatgtgtggcaggtcctgaaggagaatggccccatggcctctgaccccctctgcctcacctactcctacctgtcccatgtggacctggtgaaggacctcaactctggcctgattggagccctcctggtgtgcagggaggggagcctggccaaggaaaagacccagaccctgcacaagtttatcctgctctttgcagtctttgatgaggggaagtcctggcacagtgagaccaagaactccctgatgcaggacagagatgctgcctcagccagggcctggcccaagatgcacacagtgaatgggtatgtcaacaggagcctgccaggcctgattgggtgccacagaaagtcagtgtactggcatgtcattggcatgggcaccaccccagaggtgcactccatcttcctggagggccacaccttcctggtgaggaaccacagacaggccagcctggagatcagcccaatcaccttcctcacagcccagaccctcctcatggacctgggccagtttctcctgagctgccacatctcctcccaccagcatgatggcatggaggcctatgtgaaggtggacagctgccctgaggagccccagctcaggatgaagaacaatgaggaggcagaggactatgatgatgatctgacagactctgagatggatgtggtgagatttgatgatgacaacagcccctccttcatccagatcaggtctgtggccaagaagcaccctaagacctgggtgcactacattgcagctgaggaggaggactgggactatgcccccctggtcctggcccctgatgataggtcctacaagtcccagtacctgaacaatggcccccagaggatagggagaaagtacaagaaggtgaggttcatggcctacactgatgagaccttcaagactagggaagccatccagcatgagtctgggatcctgggccccctcctctatggggaggtgggggacaccctgctgatcatcttcaagaaccaggccagcaggccctacaacatttacccccatgggatcacagatgtgagacccctgtacagcaggagactgccaaagggggtgaagcacctgaaggacttccccatcctgccaggggagatcttcaagtacaagtggactgtgacagtggaggatgggcccaccaaatctgaccctagatgcctgaccagatactacagcagctttgtgaacatggagagggacctggcctctggactgattggccctctgctgatctgctacaaggagagtgtggaccagaggggaaaccagatcatgtctgacaagaggaatgtgatcctgttctcagtgtttgatgagaacagatcctggtacctcactgagaacatccagaggttcctgcccaacccagcaggggtgcagctggaggacccagagttccaggcctccaacatcatgcactccatcaatggctatgtctttgactccctgcagctgtcagtgtgcctgcatgaggtggcctactggtacatcctctccattggagcccagactgacttcctgtcagtcttcttcagtggctacaccttcaagcacaagatggtctatgaggacactctgaccctgttccccttctctggggagactgtgttcatgtccatggagaaccctggactgtggatcctgggctgccacaacagtgacttcaggaacaggggcatgactgccctgctgaaggtctccagctgtgacaagaacactggggactactatgaggactcctatgaggacatctctgcctacctgctgtccaagaacaatgccattgagcccaggtccttctcccagaacagcagacacccctccaccaggcagaagcagttcaatgcaaccaccatccctgaaaataccaccctgcagagtgaccaggaggagattgactatgatgacaccatctctgtggagatgaagaaggaggactttgacatctatgatgaggatgagaaccagagccctagaagcttccagaagaagaccagacactacttcattgctgcagtggaaagactgtgggactatgggatgagctcctccccccatgtgctgaggaacagggcccagtctggctctgtgccccagttcaagaaggtggtgttccaggagttcactgatggctccttcacccagcccctgtacaggggagagctgaatgagcacctgggcctgctgggcccctacatcagggctgaggtggaggacaatatcatggtgaccttcagaaaccaggcctccagaccttactccttctacagcagcctgatctcctatgaggaggaccagagacagggggctgagcccaggaagaactttgtgaagcccaatgagaccaagacctacttctggaaggtgcagcaccacatggcccccaccaaggatgagtttgactgcaaggcctgggcctacttctctgatgtggacctggagaaggatgtgcactctggcctgattggccccctgctggtgtgccacaccaacaccctgaaccctgcccatggcaggcaggtgactgtgcaggagtttgccctgttcttcaccatctttgatgagaccaagagctggtacttcactgagaacatggagaggaactgcagggccccctgcaacatccagatggaggaccccaccttcaaggagaactacaggttccatgccatcaatggctacatcatggacaccctgcctggcctggtgatggcccaggaccagaggatcaggtggtacctgctgagcatggggagcaatgagaacatccacagcatccacttctctggccatgtgttcacagtgaggaagaaggaggagtacaagatggccctgtacaacctgtaccctggggtgtttgagacagtggagatgctgccctccaaggctggaatctggagggtggagtgcctgattggggagcacctgcatgctggcatgagcaccctgttcctggtgtacagcaacaagtgccagacccccctgggcatggcctctggccacatcagagacttccagatcacagcctcaggccagtatggccagtgggcccccaagctggccaggctgcactactctggcagcatcaatgcctggtccaccaaggagcccttcagctggatcaaggtggacctcctggcccccatgatcatccatggcatcaagacccagggggccaggcagaagttcagctccctgtacatctcccagttcatcatcatgtactccctggatggcaagaagtggcagacctacagaggcaacagcacaggcaccctgatggtgttctttggcaatgtggacagctctgggatcaagcacaacatcttcaacccccccatcattgccaggtacatcagactgcaccccacccactactccatcaggtccaccctgagaatggagctgatgggctgtgacctgaacagctgcagcatgcccctgggcatggagagcaaggccatctctgatgcccagatcacagccagcagctacttcaccaacatgtttgccacctggtcccccagcaaggccaggctgcacctgcagggcaggagcaatgcctggaggccccaggtgaacaaccccaaggagtggctgcaggtggacttccagaagaccatgaaggtgacaggggtgaccacccagggggtgaagtccctgctgaccagcatgtatgtgaaggagttcctgatcagcagctcccaggatggccaccagtggaccctgttcttccagaatggcaaggtgaaggtgttccagggcaaccaggacagcttcacccctgtggtgaactccctggacccccccctgctgaccagatacctgaggatccacccccagtcctgggtgcaccagattgccctgagaatggaggtgctgggctgtgaggcccaggacctgtactgattaattaagagcatcttaccgccatttattcccatatttgttctgtttttcttgatttgggtatacatttaaatgttaataaaacaaaatggtggggcaatcatttacatttttagggatatgtaattactagttcaggtgtattgccacaagacaaacatgttaagaaactttcccgttatttacgctctgttcctgttaatcaacctctggattacaaaatttgtgaaagattgactgatattcttaactatgttgctccttttacgctgtgtggatatgctgctttatagcctctgtatctagctattgcttcccgtacggctttcgttttctcctccttgtataaatcctggttgctgtctcttttagaggagttgtggcccgttgtccgtcaacgtggcgtggtgtgctctgtgtttgctgacgcaacccccactggctggggcattgccaccacctgtcaactcctttctgggactttcgctttccccctcccgatcgccacggcagaactcatcgccgcctgccttgcccgctgctggacaggggctaggttgctgggcactgataattccgtggtgttgtctgtgccttctagttgccagccatctgttgtttgcccctcccccgtgccttccttgaccctggaaggtgccactcccactgtcctttcctaataaaatgaggaaattgcatcgcattgtctgagtaggtgtcattctattctggggggtggggtggggcaggacagcaagggggaggattgggaagacaatagcaggcatgctggggatgcggtgggctctatggctctagagcatggctacgtagataagtagcatggcgggttaatcattaactacacctgcaggaggaacccctagtgatggagttggccactccctctctgcgcgctcgctcgctcactgaggccgggcgaccaaaggtcgcccgacgcccgggcggcctcagtgagcgagcgagcgcgcagctgcctgcagg

SEQ ID NO: 63 - DNA, 5996 bp, Artificial Sequence
  Description of Artificial Sequence: Synthetic polynucleotide
cctgcaggcagctgcgcgctcgctcgctcactgaggccgcccgggcaaagcccgggcgtcgggcgacctttggtcgcccggcctcagtgagcgagcgagcgcgcagagagggagtggccaactccatcactaggggttccttgtagttaatgattaacccgccatgctacttatcgcggccgccgggggaggctgctggtgaatattaaccaaggtcaccccagttatcggaggagcaaacaggggctaagtccacacgcgtggtaccgtctgtctgcacatttcgtagagcgagtgttccgatactctaatctccctaggcaaggttcatatttgtgtaggttacttattctccttttgttgactaagtcaataatcagaatcagcaggtttggagtcagcttggcagggatcagcagcctgggttggaaggagggggtataaaagccccttcaccaggagaagccgtcacacagatccacaagctcctgaagaggtaagggtttaagggatggttggttggtggggtattaatgtttaattacctggagcacctgcctgaaatcactttttttcaggttggtttaaacgccgccaccatgcagattgaactatccacttgcttcttcctgtgtcttttgagattctgcttcagtgccaccaggagatactacctgggagctgtggagctcagctgggactacatgcagtcagacctgggagaactccctgtggatgccagattcccacctagggtgcccaagtccttccccttcaacacctcagtggtgtacaaaaagaccctgtttgtggaattcactgaccatctgttcaacattgccaaacccagaccaccctggatgggactgctgggtcccaccattcaagcagaagtctatgacactgtggtcatcactctcaagaacatggcttcccaccctgtgtccctgcatgctgtgggagtctcctactggaaggcctcagaaggggctgagtatgatgaccagacttcccaaagagaaaaggaggatgacaaggtctttcctggtggaagccacacctatgtttggcaagtcctgaaggaaaatgggcccatggcttcagaccccctgtgccttacctactcctacctgtcccatgtggatcttgtgaaggatctgaactcagggttgattggggcccttcttgtgtgtagggaaggcagccttgccaaggaaaagacccaaaccctccacaaattcattttgctgtttgcagtgtttgatgaaggaaagtcatggcactcagaaaccaagaacagcctcatgcaggacagagatgctgcctcagccagagcctggcccaagatgcacactgtgaatggatatgtgaacaggtccctgcctggattgattggctgccacaggaaatcagtgtactggcatgtcattggcatggggaccaccccagaggtccactccatcttcctggagggacacacctttctggtcagaaaccacagacaagccagcctggagatttcccccatcaccttcctgactgcccagacccttctgatggaccttgggcagttcctgttgttctgtcacattagctcccatcagcatgatggaatggaagcctatgtgaaggttgactcctgccctgaggaaccccaactcaggatgaagaacaatgaggaagcagaggactatgatgatgacctgactgactcagagatggatgttgtcagatttgatgatgacaacagcccctccttcatccaaatcagatctgtggcaaagaaacatcccaaaacctgggtccactacattgctgcagaagaagaggactgggactatgccccactggtgctggccccagatgacaggtcctacaagtcccagtacctgaacaatggacctcagaggattggtagaaagtacaagaaagtcagattcatggcctacactgatgagactttcaagaccagggaagccattcagcatgaatcaggcattctgggccccctgctgtatggagaagtgggagacactctgctgatcatcttcaagaaccaggcatccaggccctacaacatctacccacatgggatcactgatgtcaggcccctctactcaagaaggctccccaagggtgtcaagcacctgaaggactttcccatcctccctggggagatcttcaagtacaagtggactgtgactgtggaggatggcccaactaagtctgacccaagatgcttgaccagatactacagcagttttgtgaacatggagagagatctggcctctggcctgattggtcccctcctcatctgctacaaggaatcagtggaccagagagggaaccagattatgtcagacaagaggaatgtgatcttgttcagtgtatttgatgagaacaggtcctggtacctgactgagaacatccagaggttcctgcctaacccagctggtgtccagcttgaggatccagaattccaagcctcaaacatcatgcactccatcaatggttatgtgtttgacagcctccaactgtcagtgtgcctgcatgaagtggcatactggtacatcctgtccattggagcccaaactgacttcctgtctgtgttcttctctggatacactttcaagcataagatggtgtatgaggacaccctcaccctgttccccttctctggggagactgtctttatgtccatggaaaacccaggactgtggatcctgggctgtcacaactcagacttcagaaacaggggcatgactgccctgctcaaagtgtcctcctgtgacaagaacactggggactactatgaagattcctatgaggacatctcagcttatctgctgtccaagaacaatgccattgagcctaggagcttcagccagaacagcaggcacccctcaactagacagaagcagttcaatgctaccacaatcccagaaaacactacactgcagagtgaccaggaagaaattgattatgatgacactatctcagtggagatgaaaaaggaagattttgacatctatgatgaggatgagaaccaaagccctagaagctttcagaagaaaaccagacactacttcatagcagctgtggagaggctgtgggattatggcatgagctcctccccacatgtgctgagaaacagggcccagtcaggctcagtgccccaattcaagaaggtggtgttccaggagttcactgatggttccttcactcaacctctgtacaggggggagctcaatgagcaccttgggctgctgggaccttacatcagagcagaagtggaggacaacatcatggtcaccttcagaaaccaggcctcaaggccctactccttctactcctccctgatctcctatgaagaagatcagagacagggggctgaacccaggaaaaactttgtgaagcccaatgagactaagacctacttttggaaggtccagcaccacatggctcccaccaaggatgagtttgactgcaaggcctgggcatacttctcagatgtggaccttgaaaaggatgtgcactctggactcattggccccctcctggtctgccacaccaacaccctgaacccagcccatggcagacaagtcactgtgcaggagtttgccctttttttcaccatctttgatgaaaccaagtcctggtacttcactgaaaatatggagagaaactgcagagccccatgcaacatccaaatggaggaccctaccttcaaggagaactacaggttccatgccatcaatggctacatcatggacacactccctggacttgtgatggcccaggaccagagaatcagatggtacctcttgtccatgggcagcaatgagaacattcactccatccacttctctggtcatgtgttcactgttagaaagaaggaagagtacaagatggccctgtacaacctctaccctggagtgtttgaaactgtggaaatgctgcctagcaaggctgggatctggagagtggagtgcctcattggggaacatctgcatgcaggaatgtccacccttttcctggtgtactccaacaagtgccagacccctttgggaatggcatcaggccacatcagagacttccagattacagcctcaggacaatatggacagtgggcccctaagctggccaggctccactactctgggtccatcaatgcctggtccaccaaggaaccttttagctggatcaaagtggacttgctggcccccatgatcatccatggaatcaagactcagggagcaaggcagaagttctcctccctctacattagccaattcattatcatgtacagcctggatggaaagaagtggcagacctacagaggaaactccactggcaccctgatggtgttctttggaaatgtggactcctcaggaatcaagcacaacatcttcaaccctccaattattgccagatacattagactccaccccactcactactccattagaagcaccctcaggatggaactgatgggatgtgacctcaactcctgctccatgcctctgggcatggaaagcaaagccatctcagatgcccagatcactgcatccagctacttcaccaacatgtttgccacctggagcccttccaaagccagactgcatctgcaaggcagatccaatgcatggaggcctcaggtcaacaacccaaaggagtggctccaagtggacttccaaaagaccatgaaggtcacaggagtgaccacccagggagtgaagtccctgttgaccagcatgtatgtgaaggagttcctgatctcatcctcccaagatggccatcagtggactctgttcttccaaaatggcaaagtgaaggtctttcaggggaaccaggattccttcacccctgtggtcaatagcctggatccccctctattaactagatacctgaggatccacccccaaagctgggtgcaccagattgctctgaggatggaagtgttgggctgtgaggcccaagacctgtactaattaattaagagcatcttaccgccatttattcccatatttgttctgtttttcttgatttgggtatacatttaaatgttaataaaacaaaatggtggggcaatcatttacatttttagggatatgtaattactagttcaggtgtattgccacaagacaaacatgttaagaaactttcccgttatttacgctctgttcctgttaatcaacctctggattacaaaatttgtgaaagattgactgatattcttaactatgttgctccttttacgctgtgtggatatgctgctttatagcctctgtatctagctattgcttcccgtacggctttcgttttctcctccttgtataaatcctggttgctgtctcttttagaggagttgtggcccgttgtccgtcaacgtggcgtggtgtgctctgtgtttgctgacgcaacccccactggctggggcattgccaccacctgtcaactcctttctgggactttcgctttccccctcccgatcgccacggcagaactcatcgccgcctgccttgcccgctgctggacaggggctaggttgctgggcactgataattccgtggtgttgtctgtgccttctagttgccagccatctgttgtttgcccctcccccgtgccttccttgaccctggaaggtgccactcccactgtcctttcctaataaaatgaggaaattgcatcgcattgtctgagtaggtgtcattctattctggggggtggggtggggcaggacagcaagggggaggattgggaagacaatagcaggcatgctggggatgcggtgggctctatggctctagagcatggctacgtagataagtagcatggcgggttaatcattaactacacctgcaggaggaacccctagtgatggagttggccactccctctctgcgcgctcgctcgctcactgaggccgggcgaccaaaggtcgcccgacgcccgggcggcctcagtgagcgagcgagcgcgcagctgcctgcagg

SEQ ID NO: 64 - DNA, 5996 bp, Artificial Sequence
  Description of Artificial Sequence: Synthetic polynucleotide
cctgcaggcagctgcgcgctcgctcgctcactgaggccgcccgggcaaagcccgggcgtcgggcgacctttggtcgcccggcctcagtgagcgagcgagcgcgcagagagggagtggccaactccatcactaggggttccttgtagttaatgattaacccgccatgctacttatcgcggccgccgggggaggctgctggtgaatattaaccaaggtcaccccagttatcggaggagcaaacaggggctaagtccacacgcgtggtaccgtctgtctgcacatttcgtagagcgagtgttccgatactctaatctccctaggcaaggttcatatttgtgtaggttacttattctccttttgttgactaagtcaataatcagaatcagcaggtttggagtcagcttggcagggatcagcagcctgggttggaaggagggggtataaaagccccttcaccaggagaagccgtcacacagatccacaagctcctgaagaggtaagggtttaagggatggttggttggtggggtattaatgtttaattacctggagcacctgcctgaaatcactttttttcaggttggtttaaacgccgccaccatgcagattgaactctccacctgtttcttcctgtgcctgctgagattctgcttcagtgccaccaggagatactacctgggagctgtggaactgtcctgggactacatgcagtctgacttgggagagctcccagtggatgccaggttcccacctagagtgcccaagtccttccctttcaacacctcagtggtgtacaaaaagactctgtttgtggagttcactgaccacttgttcaacattgccaagccaagacccccctggatggggctactgggccccaccatccaagcagaagtctatgacactgtggtgatcaccctgaaaaacatggcctcccaccctgtgtccctgcatgctgtgggggtgtcctactggaaggcctctgaaggagcagaatatgatgaccagacctcccagagggaaaaggaggatgataaggtgttccctgggggctcccacacttatgtgtggcaagtccttaaggaaaatgggccaatggcctcagaccccctttgcttgacttactcctacctgagccatgtagatcttgtgaaggacctgaactcaggtcttattggagccttgttggtgtgcagggaaggttcactggccaaagaaaagacccagaccctgcacaagttcatcctcctgtttgctgtctttgatgagggaaagtcctggcactcagaaactaagaacagcctgatgcaggacagggatgctgcctctgctagagcctggcctaagatgcatacagtcaatggttatgtcaataggtccctgcctggattgattggatgccacaggaagtcagtgtactggcatgtcattggcatgggaaccactcctgaagtgcactccatcttcctggaagggcacacatttctagttaggaaccacagacaggcctccctggagatcagcccaatcaccttcctgactgcccagaccctcctcatggacctgggacagttcctgctgttctgccacatctcctcacaccagcatgatggaatggaggcctatgtgaaagtggacagctgccctgaggaaccccagctgagaatgaagaacaatgaagaggctgaggattatgatgatgacctcactgactcagagatggatgtggtcagatttgatgatgacaacagccccagctttattcaaatcagatcagtggccaagaagcatcctaagacctgggtgcattacattgctgctgaagaggaagattgggactatgcccccctggtgctggcacctgatgataggtcctacaagagccagtacctgaacaatggaccccagaggattggcaggaagtacaagaaggtcagattcatggcctacactgatgaaaccttcaagaccagagaggccatccagcatgagtcaggaattctgggacccctcctctatggggaagtgggagacaccctgctcatcatcttcaagaaccaggcctccagaccatacaacatctacccccatggaattactgatgtcagaccactgtactccagaagattgccaaagggagtgaagcacctgaaagacttcccaatcttgcctggggaaattttcaagtacaagtggactgtgactgtggaagatgggccaactaagtcagatcccagatgcctcactagatactactcatcctttgtgaacatggagagggacctggcttcaggactgattggcccactgctgatttgttacaaggagtcagtggatcagagaggaaaccagattatgtcagacaagaggaatgtcatcctgttcagtgtgtttgatgagaacaggagttggtacttgactgagaacattcagagattcctgccaaacccagcaggggtgcagttggaggaccctgagttccaggcttccaacatcatgcactctatcaatggctatgtgtttgactccctgcaactctctgtgtgcctgcatgaagtggcctactggtacattctctccattggtgcccagactgatttcctgtcagtgttcttctctggatacactttcaagcacaagatggtgtatgaggacaccctgaccctcttccccttctctggggaaactgtctttatgtccatggaaaaccctggactttggatcctggggtgtcacaacagtgatttcaggaacaggggaatgactgccctgctgaaagtgtcctcctgtgacaagaacactggggactactatgaagattcctatgaagatatctcagcctacctcctctccaaaaacaatgccattgagcctagatccttcagccaaaactccaggcaccccagcaccagacaaaagcaattcaatgcaaccaccatccctgagaacactaccctgcaatcagaccaagaagagattgactatgatgacaccatctcagtggagatgaagaaggaagattttgacatctatgatgaggatgagaaccagagcccaaggtccttccagaaaaagaccaggcactacttcattgcagctgtggaaagactgtgggactatggaatgtcctcctccccacatgtgctgaggaacagagcccagtcaggatcagtgccacagttcaagaaagtggtgttccaagaattcactgatggcagcttcactcagcccctgtacagaggagagctcaatgagcaccttggcctgctgggcccctacattagagctgaagtggaagataacatcatggtcactttcaggaaccaagccagcaggccttactcattctactcctcactgatcagctatgaagaggaccagagacagggagcagagcccagaaagaactttgtgaagccaaatgaaaccaagacctacttctggaaggtccagcaccatatggccccaaccaaggatgagtttgactgcaaggcctgggcctacttcagtgatgtggacctggaaaaggatgtgcactcagggctcattggacctcttctggtctgccataccaacaccctcaaccctgcccatggtagacaagtcactgtgcaagaatttgccctgttcttcaccatttttgatgaaactaaaagctggtacttcacagagaacatggaaagaaactgcagggccccctgcaacatccaaatggaggaccccactttcaaggaaaactacagattccatgccattaatggatacatcatggacaccctgcctggcttagtgatggcccaggaccaaaggatcagatggtacctgttgtccatgggttccaatgagaacatccactccatacatttctcaggacatgtgttcactgtcagaaagaaagaggagtacaagatggccctttacaacctttaccctggggtctttgaaactgtggagatgctgccatccaaggctggcatctggagagtggaatgcctgattggagaacacctccatgctggaatgtccaccctcttcctggtgtactcaaacaagtgccagacccctctgggcatggcctcaggacacattagggacttccagatcactgcctctggccagtatggtcaatgggcccccaagcttgccagactgcattactctgggtccatcaatgcctggagcaccaaggaacctttctcctggatcaaagtggacctcctggcccccatgattatccatggcatcaagacccagggagccaggcagaagttctcctccctgtacattagccaattcatcattatgtacagcctggatggaaagaagtggcagacctacagaggaaacagcactggcaccctgatggtcttttttggcaatgtggacagctctgggatcaagcataacatcttcaaccctcccataattgcaagatacatcaggctgcaccccacccactacagcatcaggtccaccctgagaatggagctcatgggctgtgacctgaacagctgctccatgcctctgggaatggaatccaaagccatctcagatgcccaaatcacagcctcctcctacttcaccaacatgtttgctacctggagcccttccaaagccaggctgcacttacaaggaagaagcaatgcatggaggcctcaggtcaacaaccccaaggagtggctgcaagtggacttccaaaagaccatgaaagtcactggagtgaccactcaaggagtgaagtccctgttgaccagcatgtatgtcaaggaatttctgatctcaagctcccaagatggccatcagtggactctgttcttccaaaatggaaaggtcaaggtgttccagggcaaccaggacagctttacccctgttgtgaactccctggacccccccctgctgactagatacttgagaatccacccccagtcctgggtgcaccagattgcattgagaatggaagtccttggctgtgaagcccaggacctgtactaattaattaagagcatcttaccgccatttattcccatatttgttctgtttttcttgatttgggtatacatttaaatgttaataaaacaaaatggtggggcaatcatttacatttttagggatatgtaattactagttcaggtgtattgccacaagacaaacatgttaagaaactttcccgttatttacgctctgttcctgttaatcaacctctggattacaaaatttgtgaaagattgactgatattcttaactatgttgctccttttacgctgtgtggatatgctgctttatagcctctgtatctagctattgcttcccgtacggctttcgttttctcctccttgtataaatcctggttgctgtctcttttagaggagttgtggcccgttgtccgtcaacgtggcgtggtgtgctctgtgtttgctgacgcaacccccactggctggggcattgccaccacctgtcaactcctttctgggactttcgctttccccctcccgatcgccacggcagaactcatcgccgcctgccttgcccgctgctggacaggggctaggttgctgggcactgataattccgtggtgttgtctgtgccttctagttgccagccatctgttgtttgcccctcccccgtgccttccttgaccctggaaggtgccactcccactgtcctttcctaataaaatgaggaaattgcatcgcattgtctgagtaggtgtcattctattctggggggtggggtggggcaggacagcaagggggaggattgggaagacaatagcaggcatgctggggatgcggtgggctctatggctctagagcatggctacgtagataagtagcatggcgggttaatcattaactacacctgcaggaggaacccctagtgatggagttggccactccctctctgcgcgctcgctcgctcactgaggccgggcgaccaaaggtcgcccgacgcccgggcggcctcagtgagcgagcgagcgcgcagctgcctgcagg

SEQ ID NO: 65 - DNA, 5996 bp, Artificial Sequence
  Description of Artificial Sequence: Synthetic polynucleotide
cctgcaggcagctgcgcgctcgctcgctcactgaggccgcccgggcaaagcccgggcgtcgggcgacctttggtcgcccggcctcagtgagcgagcgagcgcgcagagagggagtggccaactccatcactaggggttccttgtagttaatgattaacccgccatgctacttatcgcggccgccgggggaggctgctggtgaatattaaccaaggtcaccccagttatcggaggagcaaacaggggctaagtccacacgcgtggtaccgtctgtctgcacatttcgtagagcgagtgttccgatactctaatctccctaggcaaggttcatatttgtgtaggttacttattctccttttgttgactaagtcaataatcagaatcagcaggtttggagtcagcttggcagggatcagcagcctgggttggaaggagggggtataaaagccccttcaccaggagaagccgtcacacagatccacaagctcctgaagaggtaagggtttaagggatggttggttggtggggtattaatgtttaattacctggagcacctgcctgaaatcactttttttcaggttggtttaaacgccgccaccatgcagattgagctctccacctgtttcttcctttgcctcctgagattctgttttagtgccaccagaagatactacctgggtgctgtggaactctcctgggactacatgcagtcagacctgggtgaactgcctgtggatgccagattccccccaagagtgcccaagtccttccccttcaacacctcagtggtctacaagaaaaccctctttgtggagttcactgaccacctcttcaacattgccaagcctaggcccccatggatgggcctgctgggacccaccatccaagctgaagtgtatgacactgtggtcatcaccctcaagaacatggcctcccaccctgtctccctgcatgctgtgggtgtctcctactggaaggcctcagagggagcagaatatgatgaccaaacctcccagagagaaaaggaagatgacaaggtctttccaggaggctcccatacctatgtgtggcaagtgcttaaggagaatggcccaatggcctcagaccccctctgcctgacctactcctacctctcccatgtggacctggtcaaggacctgaactcaggtcttattggagccctgcttgtgtgcagagagggcagcctggccaaggaaaagacccaaaccctgcacaagttcatcctgctgtttgcagtgtttgatgagggaaagtcctggcactcagaaaccaagaacagcctgatgcaggatagagatgctgcctcagccagggcctggcccaagatgcacactgtgaatggctatgtgaacagaagcctgccaggcttgattggatgtcacaggaagtctgtgtactggcatgtcattggcatgggcaccacccctgaggtgcactccatcttcttggaaggccataccttcttggtcagaaaccataggcaggcctccctggaaatctcccctatcaccttcttgactgcccaaactctcctgatggacctgggccagttcttgctgttctgccacatcagctcacatcagcatgatgggatggaggcctatgtgaaggtggacagctgcccagaagaacctcagttaaggatgaagaacaatgaggaggcagaggactatgatgatgacctgactgactctgagatggatgttgtcagatttgatgatgacaacagcccaagcttcattcagatcagatcagtggccaagaagcaccccaagacttgggtgcactacatagctgcagaggaagaggattgggactatgctcctcttgtgctggcccctgatgacaggagctacaaatcccagtaccttaacaatggcccccagaggattggaaggaagtacaagaaagtcaggttcatggcatacactgatgagactttcaagactagagaggccatccagcatgagtcagggatcctgggcccactgctgtatggagaagtgggggacaccctcctcatcattttcaagaaccaagctagcagaccctataacatctaccctcatgggatcactgatgtcaggcccctgtactcaagaaggctgcctaagggagtgaaacacctgaaggacttccccatcctccctggagagatcttcaagtacaagtggactgtgactgtggaagatggaccaaccaagtcagaccccagatgtctgaccagatactacagctcctttgtcaacatggaaagggacctggcctcagggcttattggaccactgctcatctgttacaaggaatcagtggaccagaggggaaaccagattatgtcagacaagagaaatgtgatcctgttctcagtctttgatgagaacagatcctggtacctgactgaaaacattcaaagattcctgcccaaccctgctggagtgcagctggaggacccagagttccaggcctccaacatcatgcactccattaatggttatgtctttgactccctgcaactgtcagtctgcctgcatgaagtggcctactggtacatcctgagcattggagcccagactgacttcctgtcagtattcttttctggctacaccttcaagcataagatggtgtatgaagataccctcactctgttccccttttctggggaaactgtgttcatgagcatggaaaaccctggactgtggatcctgggttgccacaactcagacttcaggaacagagggatgactgccctgttgaaggtgtcctcctgtgacaagaacactggggactactatgaagatagctatgaggacatctcagcctaccttttgtccaagaacaatgccattgagcccagaagcttcagtcagaacagcagacatcccagcaccaggcagaagcagttcaatgccaccaccattcctgaaaacaccaccctgcaatctgaccaggaggaaattgattatgatgacacaatctctgtggagatgaagaaagaggactttgacatctatgatgaagatgagaaccaatccccaagatccttccagaaaaagaccaggcactacttcattgctgctgtggaaagactctgggactatggaatgagctcctccccccatgtgttgagaaacagagcccagtcaggctcagtgcctcagtttaagaaagtggtgttccaggaattcactgatggatccttcacccaacccctgtacagaggagaacttaatgagcacctgggactgctgggcccctacatcagggctgaagtggaggacaacatcatggtcacattcagaaaccaggcttccagaccttacagcttctactcctccctcatctcctatgaggaggatcagagacagggggctgaacccaggaaaaactttgtcaagcccaatgagactaagacctacttctggaaggtccagcaccacatggcccccactaaggatgaatttgactgcaaggcctgggcatacttctcagatgtggatctggaaaaagatgtgcactcaggactgattggacctctgctggtctgccacaccaacactctgaaccctgcccatggcagacaagtcactgtgcaggagtttgctctctttttcaccatttttgatgaaaccaagtcctggtacttcactgagaacatggagaggaactgcagggccccctgcaacattcagatggaggaccccaccttcaaggagaactacagattccatgccatcaatggttacatcatggacaccctgcctggacttgtcatggcccaagaccagagaattaggtggtacctcctctcaatgggatccaatgagaacatccactccatccacttcagtggacatgtgttcacagtcagaaagaaggaagagtacaagatggccctgtacaacctgtaccctggggtgtttgaaactgtggaaatgctgcccagcaaggctggaatctggagggtggaatgcctgattggggaacacctccatgctggaatgtccaccctttttctggtctactccaacaagtgccagacccctctggggatggcatcaggccacatcagagacttccaaatcacagcctctggacagtatggccaatgggcccctaagctggccaggttgcactactcaggctccatcaatgcctggtccactaaggagcctttctcctggattaaggtggaccttctggcccctatgatcatccatggtatcaagacccagggtgccagacaaaagttctccagcctgtacataagccagttcatcattatgtactccttggatggaaagaagtggcaaacctacaggggcaactccactggtactctcatggtgttctttggaaatgtggactcctctggtatcaagcacaacatcttcaaccctcccatcattgccagatacattagactgcaccccacacactacagcatcagaagcaccctcaggatggaactgatgggctgtgacttgaacagctgcagcatgccattgggaatggaatccaaggctatttcagatgctcagatcactgcctcctcctacttcactaacatgtttgccacctggtccccatcaaaagccaggctgcatctgcagggcagaagcaatgcctggaggccccaagtgaacaacccaaaggaatggcttcaggttgatttccaaaagaccatgaaagtcactggagtgaccacccagggagtgaagtccctgctgacctccatgtatgtgaaagaattcctgatctcatcctcccaagatgggcaccagtggaccctcttcttccaaaatggaaaggtcaaggtgttccaaggaaaccaggactccttcacccctgtggtcaactccctggacccaccactgctgactaggtacctcagaatccatcctcaatcctgggtgcaccagattgccctcagaatggaagtgctgggctgtgaagcacaggacctgtactgattaattaagagcatcttaccgccatttattcccatatttgttctgtttttcttgatttgggtatacatttaaatgttaataaaacaaaatggtggggcaatcatttacatttttagggatatgtaattactagttcaggtgtattgccacaagacaaacatgttaagaaactttcccgttatttacgctctgttcctgttaatcaacctctggattacaaaatttgtgaaagattgactgatattcttaactatgttgctccttttacgctgtgtggatatgctgctttatagcctctgtatctagctattgcttcccgtacggctttcgttttctcctccttgtataaatcctggttgctgtctcttttagaggagttgtggcccgttgtccgtcaacgtggcgtggtgtgctctgtgtttgctgacgcaacccccactggctggggcattgccaccacctgtcaactcctttctgggactttcgctttccccctcccgatcgccacggcagaactcatcgccgcctgccttgcccgctgctggacaggggctaggttgctgggcactgataattccgtggtgttgtctgtgccttctagttgccagccatctgttgtttgcccctcccccgtgccttccttgaccctggaaggtgccactcccactgtcctttcctaataaaatgaggaaattgcatcgcattgtctgagtaggtgtcattctattctggggggtggggtggggcaggacagcaagggggaggattgggaagacaatagcaggcatgctggggatgcggtgggctctatggctctagagcatggctacgtagataagtagcatggcgggttaatcattaactacacctgcaggaggaacccctagtgatggagttggccactccctctctgcgcgctcgctcgctcactgaggccgggcgaccaaaggtcgcccgacgcccgggcggcctcagtgagcgagcgagcgcgcagctgcctgcagg

SEQ ID NO: 66 - DNA, 5996 bp, Artificial Sequence
  Description of Artificial Sequence: Synthetic polynucleotide
cctgcaggcagctgcgcgctcgctcgctcactgaggccgcccgggcaaagcccgggcgtcgggcgacctttggtcgcccggcctcagtgagcgagcgagcgcgcagagagggagtggccaactccatcactaggggttccttgtagttaatgattaacccgccatgctacttatcgcggccgccgggggaggctgctggtgaatattaaccaaggtcaccccagttatcggaggagcaaacaggggctaagtccacacgcgtggtaccgtctgtctgcacatttcgtagagcgagtgttccgatactctaatctccctaggcaaggttcatatttgtgtaggttacttattctccttttgttgactaagtcaataatcagaatcagcaggtttggagtcagcttggcagggatcagcagcctgggttggaaggagggggtataaaagccccttcaccaggagaagccgtcacacagatccacaagctcctgaagaggtaagggtttaagggatggttggttggtggggtattaatgtttaattacctggagcacctgcctgaaatcactttttttcaggttggtttaaacgccgccaccatgcagattgaactgtcgacatgcttcttcttgtgtcttttgagattctgtttttccgctactcggagatactacttgggagccgtggaactgtcctgggactacatgcaatccgacttgggagagctgcctgtggacgcgcgcttcccgccgcgcgtgccgaagtccttcccattcaacaccagcgtggtgtacaaaaagacgctgttcgtggagtttaccgaccatctgttcaatatcgcaaagcctcgccccccctggatgggtttgctcgggcccaccatccaagccgaagtgtatgacaccgtggtcatcacactgaagaacatggccagccacccagtgtcgctgcacgcagtgggcgtgtcctactggaaagcctccgaaggggcggagtacgacgaccagacttcgcagagagaaaaggaggacgacaaggttttccctgggggatcccacacctacgtgtggcaagtgctgaaggaaaatggacccatggcgtccgatccgctgtgtctgacttactcctacctgagccacgtggaccttgtgaaagacctgaactcaggcctgatcggagccctgctggtctgccgcgagggaagcctggcgaaggaaaagactcaaaccctccacaagttcattctgctgttcgcggtgtttgatgagggaaagagctggcactccgaaaccaagaacagcctgatgcaggaccgagatgctgcctccgcccgggcctggcccaagatgcacactgtgaacggctacgttaaccgctccctgcccggacttatcggatgccaccggaagtcagtgtattggcacgtgatcggcatggggaccaccccggaggtgcactccatcttcctggagggacacaccttccttgtgcggaaccacagacaggcatcactggaaatctccccgattaccttcctgaccgctcagaccctgctgatggacctcggtcaattcctcctcttttgccacatttcaagccatcagcatgacgggatggaagcctacgtgaaggtcgactcctgccctgaggaaccacagctgcggatgaagaacaacgaagaggctgaggactacgatgatgacctgaccgacagcgaaatggatgtcgtgcggttcgatgacgacaacagccccagcttcattcaaatccgctccgtggccaagaagcatccgaaaacttgggtgcactacatcgctgccgaggaagaggattgggattacgccccactcgtgctggcccccgacgaccggtcctacaagtcccagtacctgaacaacgggcctcagcgcatcggtcggaagtacaagaaggtccgcttcatggcctacacggacgaaaccttcaagacaagagaagcaattcagcacgaatccggtattctgggacctctgctgtacggggaggtcggagacacccttctcattatctttaagaaccaggcatcgcggccttataacatctatcctcacggaatcaccgatgtcagacctctctactcccggaggctccctaagggtgtcaagcacctgaaagatttccccatcctgcccggagagatcttcaagtacaagtggaccgtcaccgtcgaggacggccccactaagtcagacccgagatgtttgacacggtactacagctcgttcgtgaacatggagcgggatctggccagcggactgattggtccactcctgatctgctacaaggaatccgtggatcagaggggcaatcagatcatgtccgacaagcggaacgtgatattgttctcggtattcgacgaaaaccggtcgtggtacctcaccgagaacatccagcgctttctgcctaaccccgccggcgtgcagctcgaggacccggaattccaggcctctaacattatgcatagcatcaatggttacgtgttcgattccctgcaactgtccgtgtgcctccacgaagtggcttattggtacatcctctcgattggcgcccagactgatttcctgagcgtgttcttctccggctatactttcaagcataagatggtgtacgaggacaccctgaccctgttcccgttttcgggagagactgtgttcatgtccatggagaacccgggactgtggattctcggttgccacaactccgacttccgcaaccgcggcatgaccgcgctgctcaaagtgtcgtcctgcgacaagaacaccggcgattattacgaggactcgtacgaagatattagcgcctaccttctgtcgaagaacaatgccatcgagccaagatcgtttagccagaacagccgccacccctccacccgacaaaagcaattcaacgccaccacgatcccggaaaacacaacgctgcagtccgaccaggaagagattgattacgatgatactatctccgtcgagatgaagaaagaggacttcgacatctacgacgaggacgaaaaccagagcccccgctccttccaaaagaaaactcgccactattttatcgccgccgtggagaggctgtgggattacggaatgtcatccagcccgcatgtgctgcggaacagggcccagagcggatccgtgccacaattcaagaaagtggtgttccaagaattcaccgatgggtcattcacccaaccgctgtaccgcggagagttgaacgaacacttgggccttttgggaccttacattcgggccgaggtcgaggataacatcatggtgacctttaggaaccaagcttcccgcccctactcattctactcatctctgatctcctacgaagaggatcagcggcagggcgccgaaccgagaaagaacttcgtcaagcctaacgaaactaagacttacttctggaaagtgcagcaccacatggcccctaccaaggacgagttcgactgcaaggcctgggcgtacttctccgacgtggacttggaaaaggacgtgcattcggggctgatcggcccgctgttagtgtgtcacaccaacactctgaaccccgcccacggacgccaggtcaccgtgcaagaattcgcgctgttcttcaccattttcgacgaaaccaagtcgtggtacttcactgaaaacatggaacgcaactgcagagccccatgcaacattcagatggaggacccgacctttaaggagaattaccggttccatgccatcaacggatacatcatggacactctccccggtctggtcatggcccaggatcagagaatccggtggtacctcctgagcatgggctccaacgagaatatccacagcatacacttctccggacacgtgttcactgtgcggaagaaggaagagtacaagatggccctgtacaacctgtacccaggggtgtttgaaaccgtggaaatgttgccgtccaaggctggaatttggcgcgtggaatgcctgattggggagcatctgcacgcgggaatgtccaccctgttcctcgtctactccaacaagtgccaaactccgctgggaatggcctcgggacacatcagagacttccagatcaccgcctccgggcagtacggccagtgggccccgaagctcgcccgcctgcattactccggttccatcaacgcctggtcgaccaaggagccattctcctggattaaggtcgatctgctggcaccgatgatcatccacggcatcaagacccagggcgctagacaaaagttcagctccctgtacattagccagttcatcatcatgtactcactggacgggaagaagtggcagacctaccgcggcaattccaccggaactctgatggtgttctttggcaacgtcgacagctcgggaatcaagcacaacattttcaaccctccgatcatcgcccgctacattagactccaccctacccactattcaatccggtccaccctccggatggagctcatgggctgcgacctcaacagttgttccatgccgctggggatggaatccaaggccatctccgatgctcaaattacggctagctcctatttcaccaacatgttcgcgacctggtcgccgtctaaagccagactgcatctacaaggccggtccaatgcgtggcgcccccaagtcaacaacccgaaggagtggctccaggtcgactttcaaaagactatgaaagtcaccggagtgactactcagggagtgaagtcacttctcacttctatgtacgtgaaggaattcctgatctcgtcgtcccaagacggtcatcagtggactctcttcttccaaaacggcaaagtcaaggtgttccagggcaaccaggactccttcacccccgtcgtgaactcccttgatccccctctgctgactcgctacctgaggatccaccctcagtcctgggtgcaccagatcgcactcaggatggaagtgttgggctgcgaggcccaggacctgtactaattaattaagagcatcttaccgccatttattcccatatttgttctgtttttcttgatttgggtatacatttaaatgttaataaaacaaaatggtggggcaatcatttacatttttagggatatgtaattactagttcaggtgtattgccacaagacaaacatgttaagaaactttcccgttatttacgctctgttcctgttaatcaacctctggattacaaaatttgtgaaagattgactgatattcttaactatgttgctccttttacgctgtgtggatatgctgctttatagcctctgtatctagctattgcttcccgtacggctttcgttttctcctccttgtataaatcctggttgctgtctcttttagaggagttgtggcccgttgtccgtcaacgtggcgtggtgtgctctgtgtttgctgacgcaacccccactggctggggcattgccaccacctgtcaactcctttctgggactttcgctttccccctcccgatcgccacggcagaactcatcgccgcctgccttgcccgctgctggacaggggctaggttgctgggcactgataattccgtggtgttgtctgtgccttctagttgccagccatctgttgtttgcccctcccccgtgccttccttgaccctggaaggtgccactcccactgtcctttcctaataaaatgaggaaattgcatcgcattgtctgagtaggtgtcattctattctggggggtggggtggggcaggacagcaagggggaggattgggaagacaatagcaggcatgctggggatgcggtgggctctatggctctagagcatggctacgtagataagtagcatggcgggttaatcattaactacacctgcaggaggaacccctagtgatggagttggccactccctctctgcgcgctcgctcgctcactgaggccgggcgaccaaaggtcgcccgacgcccgggcggcctcagtgagcgagcgagcgcgcagctgcctgcagg

SEQ ID NO: 67 - DNA, 5996 bp, Artificial Sequence
  Description of Artificial Sequence: Synthetic polynucleotide
cctgcaggcagctgcgcgctcgctcgctcactgaggccgcccgggcaaagcccgggcgtcgggcgacctttggtcgcccggcctcagtgagcgagcgagcgcgcagagagggagtggccaactccatcactaggggttccttgtagttaatgattaacccgccatgctacttatcgcggccgccgggggaggctgctggtgaatattaaccaaggtcaccccagttatcggaggagcaaacaggggctaagtccacacgcgtggtaccgtctgtctgcacatttcgtagagcgagtgttccgatactctaatctccctaggcaaggttcatatttgtgtaggttacttattctccttttgttgactaagtcaataatcagaatcagcaggtttggagtcagcttggcagggatcagcagcctgggttggaaggagggggtataaaagccccttcaccaggagaagccgtcacacagatccacaagctcctgaagaggtaagggtttaagggatggttggttggtggggtattaatgtttaattacctggagcacctgcctgaaatcactttttttcaggttggtttaaacgccgccaccatgcaaattgaactgtccacctgtttcttcctgtgcttgctcagattctgcttcagtgccaccagaagatactacctgggggctgttgagctgtcatgggactacatgcagagtgacctgggagagctccctgtggatgccaggttcccaccaagagtccccaagtccttccccttcaacacctcagtggtgtacaaaaagaccctctttgtggagttcactgaccacctgttcaacattgccaagcccagacccccctggatgggcctcttgggccctaccatccaagctgaagtgtatgacactgtggtgatcaccctgaagaacatggcctcccaccctgtgtccctgcatgctgtgggagtcagctactggaaggcctcagagggggcagaatatgatgaccagaccagccagagagaaaaggaagatgacaaggtgttccctgggggatcccacacctatgtgtggcaagtgctcaaggaaaatggtcccatggcctcagaccctctgtgtctgacctactcctacctctcccatgtggacctggtcaaggacctgaactcaggcttaattggagccctgcttgtgtgcagggagggttcccttgctaaggaaaagacccagaccctgcacaagttcatcctgctgtttgctgtctttgatgagggaaagtcctggcactcagaaactaagaacagcctgatgcaggacagggatgctgcctcagccagagcctggcccaagatgcacactgtgaatggttatgtgaacagaagcttgcctggcctcattggatgccacagaaaatcagtctactggcatgtcattggcatgggaaccacccctgaggtccacagcatcttcctggagggccataccttccttgtgagaaaccatagacaggcctcccttgaaatctcccccatcaccttcctcactgcccaaaccctcctcatggacttgggccagttcctcttgttctgccacatctccagccatcagcatgatggaatggaagcctatgtgaaggtggactcctgccctgaggagccccagctgagaatgaaaaacaatgaggaggcagaggattatgatgatgacctgactgactcagagatggatgtggtcaggtttgatgatgacaactccccttccttcattcaaattaggagtgtggccaagaaacaccccaaaacctgggtccactacattgcagcagaggaagaggactgggactatgcaccactggtgctggcccctgatgacaggtcctacaagtcccagtacctgaacaatggcccccagaggattggaagaaagtacaagaaagtcaggttcatggcctacactgatgaaaccttcaagaccagagaagccatccagcatgagtcaggcatcctgggaccacttctctatggggaagtgggggacaccctgctgatcatcttcaaaaaccaggcctccagaccctacaacatctacccccatggcatcactgatgtcaggcccctctactcaagaaggctgcccaagggagtcaagcaccttaaggacttccccattctgcctggagagatcttcaagtacaagtggactgtgactgtggaagatgggccaaccaagtcagaccccagatgcctgaccagatactacagcagctttgtcaacatggagagggacctggcctcaggactcattggtccactcctgatctgctacaaggaatcagtggaccagaggggaaaccagatcatgtcagacaagaggaatgtgatcctgttctctgtgtttgatgagaacaggtcctggtacctgacagaaaacatccagaggttcctgcctaacccagctggagtgcagctggaggacccagagttccaagcctccaacatcatgcacagcatcaatggatatgtgtttgacagccttcaactgtcagtgtgcctccatgaagtggcctactggtacatactgtccattggagcccagactgacttcctgtctgtgttcttctctggatacaccttcaagcacaagatggtgtatgaggacacactgaccctgttccctttctctggggaaactgtgttcatgagcatggagaaccctggcctgtggatcctgggctgccacaactcagacttcagaaacagagggatgactgccctgctgaaggtgtcctcctgtgacaagaacactggagactactatgaggactcctatgaggacatctcagcatacctcttgagcaagaacaatgccattgaacccaggagcttctcccaaaactccagacacccaagcaccagacaaaagcaattcaatgctaccaccattcctgaaaacacaaccctgcagtcagaccaggaggaaattgactatgatgacactatttctgtggaaatgaagaaggaggactttgacatctatgatgaagatgaaaaccagtcccctaggagcttccagaagaaaaccaggcactactttatagcagcagtggagagactgtgggactatggaatgtcctcctcccctcatgtgctgagaaacagagcccagtcaggatcagtgccccagttcaagaaggtggtgttccaggaattcactgatggatccttcacccaacccctgtacagaggggaattgaatgagcacctgggcctgctgggaccctacattagggctgaagtggaggacaacatcatggtcaccttcagaaaccaggcatccagaccttacagcttctacagctccctgatctcctatgaagaggaccagagacagggagctgagcccagaaagaactttgtcaagcccaatgagactaagacctacttctggaaagtgcagcaccacatggcccccaccaaggatgaatttgactgcaaggcctgggcctacttctctgatgtggatctggaaaaggatgtgcactctggtctgattggcccccttctggtctgccacaccaacactctgaaccctgcccatggtagacaggtcactgtgcaagagtttgccctcttcttcaccatctttgatgaaaccaagtcctggtacttcactgaaaacatggaaagaaactgcagggccccctgcaacatccaaatggaggaccccaccttcaaggagaactacaggttccatgccatcaatggctacatcatggataccctgcctggactggtcatggcccaggaccagaggatcagatggtacctcctgagcatgggcagcaatgagaacattcactccatccactttagtgggcatgtgttcactgtcaggaagaaggaagagtacaagatggccctgtacaacctgtaccctggagtgtttgagactgtggagatgctgcccagcaaagctggaatctggagggtggaatgcctgattggtgaacacctccatgctggaatgtccaccctcttcctggtgtactccaacaagtgccagactcctttggggatggcctcagggcacattagggacttccagatcactgcatcaggacagtatggccaatgggccccaaagctggccagactgcactactctggttccatcaatgcctggtccaccaaggaaccattctcctggatcaaggtggacctcctggcccccatgattattcatggaatcaagacccagggagccaggcagaagttctccagcctctacatcagccagttcatcatcatgtactcccttgatggaaagaagtggcagacctacagaggaaactccactggcaccctgatggtgttctttggcaatgtggactcctctggtatcaagcacaacatcttcaaccctccaatcattgccagatacatcagactgcacccaacccactactccattaggtccaccctgaggatggaactcatgggctgtgacctcaactcctgctccatgcctctgggcatggaatccaaggccatctcagatgcacaaattactgcctcctcctacttcaccaacatgtttgccacatggagcccttccaaggccaggctgcacctccaaggcagaagcaatgcctggaggccccaggtcaacaaccccaaggaatggctccaggtagacttccaaaagaccatgaaggtcactggagtcaccacccagggagtgaagtccctgctgacctctatgtatgtgaaggaattcctaatcagcagctcccaggatggtcaccagtggacccttttcttccaaaatgggaaagtgaaggtgttccaaggcaaccaggacagcttcacccctgtggtcaacagccttgaccctcccctgttgactagatacctcagaatccacccccagtcctgggtgcaccagattgccctgagaatggaagtgctgggctgtgaagcccaggacttgtactaattaattaagagcatcttaccgccatttattcccatatttgttctgtttttcttgatttgggtatacatttaaatgttaataaaacaaaatggtggggcaatcatttacatttttagggatatgtaattactagttcaggtgtattgccacaagacaaacatgttaagaaactttcccgttatttacgctctgttcctgttaatcaacctctggattacaaaatttgtgaaagattgactgatattcttaactatgttgctccttttacgctgtgtggatatgctgctttatagcctctgtatctagctattgcttcccgtacggctttcgttttctcctccttgtataaatcctggttgctgtctcttttagaggagttgtggcccgttgtccgtcaacgtggcgtggtgtgctctgtgtttgctgacgcaacccccactggctggggcattgccaccacctgtcaactcctttctgggactttcgctttccccctcccgatcgccacggcagaactcatcgccgcctgccttgcccgctgctggacaggggctaggttgctgggcactgataattccgtggtgttgtctgtgccttctagttgccagccatctgttgtttgcccctcccccgtgccttccttgaccctggaaggtgccactcccactgtcctttcctaataaaatgaggaaattgcatcgcattgtctgagtaggtgtcattctattctggggggtggggtggggcaggacagcaagggggaggattgggaagacaatagcaggcatgctggggatgcggtgggctctatggctctagagcatggctacgtagataagtagcatggcgggttaatcattaactacacctgcaggaggaacccctagtgatggagttggccactccctctctgcgcgctcgctcgctcactgaggccgggcgaccaaaggtcgcccgacgcccgggcggcctcagtgagcgagcgagcgcgcagctgcctgcagg

SEQ ID NO: 68 - DNA, 5996 bp, Artificial Sequence
  Description of Artificial Sequence: Synthetic polynucleotide
cctgcaggcagctgcgcgctcgctcgctcactgaggccgcccgggcaaagcccgggcgtcgggcgacctttggtcgcccggcctcagtgagcgagcgagcgcgcagagagggagtggccaactccatcactaggggttccttgtagttaatgattaacccgccatgctacttatcgcggccgccgggggaggctgctggtgaatattaaccaaggtcaccccagttatcggaggagcaaacaggggctaagtccacacgcgtggtaccgtctgtctgcacatttcgtagagcgagtgttccgatactctaatctccctaggcaaggttcatatttgtgtaggttacttattctccttttgttgactaagtcaataatcagaatcagcaggtttggagtcagcttggcagggatcagcagcctgggttggaaggagggggtataaaagccccttcaccaggagaagccgtcacacagatccacaagctcctgaagaggtaagggtttaagggatggttggttggtggggtattaatgtttaattacctggagcacctgcctgaaatcactttttttcaggttggtttaaacgccgccaccatgcagattgaactctccacctgtttcttcctgtgcctgctgagattctgcttcagtgccaccaggaggtactacttgggtgcagtggagctctcctgggactacatgcagtcagacctgggagagctccctgtggatgccaggttccctccaagggtccctaaatccttccccttcaacacctcagtggtgtacaagaaaaccctgtttgtggaattcactgaccacctgttcaacattgccaagcccaggccaccctggatggggctcctgggcccaaccatccaagctgaagtgtatgacactgtggtcatcaccctcaagaacatggcctcccaccctgtctccctgcatgctgtgggagtgtcctactggaaggcctcagagggggctgagtatgatgaccagacctcccagagggaaaaggaagatgacaaggtgttcccaggaggatcccacacctatgtgtggcaagtcctgaaggaaaatggtcccatggcatcagaccccttgtgcttgacctactcctacctgagccatgtggacctggtcaaggacctgaactcaggccttattggagccctgcttgtatgcagagagggcagcctggccaaggaaaagacccagaccctgcacaagttcatcctcctgtttgctgtgtttgatgaaggaaagtcctggcactcagagactaagaacagcctgatgcaggacagggatgcagcatcagccagagcctggcccaagatgcacactgtgaatggatatgtgaacaggtccctccctggactaattggatgccacagaaagtctgtgtactggcatgtcattggaatgggcacaacccctgaagtgcatagcatcttcctggaaggacacaccttcctggtcaggaaccacagacaggcatccctggagatctccccaatcaccttcctgactgcccagactctcctgatggacctgggacagttcttgcttttctgccacatctcctcccaccaacatgatggcatggaagcctatgtgaaggtggactcctgccctgaggaacctcaactgaggatgaaaaacaatgaagaagctgaagattatgatgatgacctgactgactcagagatggatgttgtcagatttgatgatgacaacagccctagcttcatccagattagatctgtggccaagaagcaccccaagacctgggtgcactacattgctgctgaggaagaggactgggactatgcccccctggtgctggcccctgatgacagatcctacaagtcccagtacctgaacaatggtccccagagaattgggagaaagtacaagaaagtcagattcatggcctacactgatgaaaccttcaagactagagaagccatccagcatgagtcaggcattctgggtcccctgctgtatggggaagttggtgacaccctgctgatcatcttcaagaaccaagccagcaggccttacaacatctacccccatggaattacagatgtcaggccactgtactccaggagactgcctaagggagtcaagcacctcaaggacttccccatcctgcctggagaaatcttcaagtacaagtggactgtgactgtggaggatgggcctaccaagtcagaccctagatgcctgactaggtactactccagctttgtcaacatggagagagacttggcctcaggactcattggtccactgcttatttgctacaaggagtcagtggaccagagaggaaaccaaatcatgtctgacaagagaaatgtcatcctgttctcagtctttgatgagaacaggtcctggtacctgactgaaaacatccagagattcctgcccaaccctgctggggtgcaactggaggaccctgagttccaggcctcaaacataatgcacagcatcaatggctatgtctttgactccctgcaactgtcagtgtgcttgcatgaagtggcctactggtacatcctctccattggggcccagactgacttcctgtcagtgtttttctctggctacaccttcaagcataaaatggtgtatgaggacaccctcaccctgttccccttctctggagagactgtgttcatgagcatggaaaacccaggcctctggatccttggctgtcacaactcagacttcagaaacaggggcatgactgccctgcttaaggtgtccagctgtgacaagaacactggggactactatgaggactcctatgaggacatcagtgcctaccttctgtccaagaacaatgccattgaacctaggagcttcagccagaactccaggcacccaagcaccaggcagaagcagttcaatgccaccaccatccctgagaacactaccctgcaatcagaccaagaagaaattgactatgatgacaccatctcagtggagatgaagaaggaggactttgacatctatgatgaagatgaaaaccaaagccccagatccttccagaaaaagaccaggcactacttcattgcagcagtggagagattatgggactatgggatgtccagctcccctcatgtgctgagaaacagagcacagtctggctcagtgccccagttcaagaaggtggtgttccaggagttcactgatggttccttcacccaaccattgtacaggggagagctgaatgagcacctgggcctgttgggcccatacatcagagcagaagtggaggacaacatcatggtcaccttcagaaaccaggcctccagaccctactccttctactcctccctgatctcctatgaagaggaccaaagacagggagctgagcccagaaagaactttgtgaagccaaatgaaaccaagacctacttctggaaagtgcagcaccacatggcccccaccaaggatgagtttgactgcaaagcttgggcctacttcagtgatgtggacttggagaaggatgtgcactcaggtcttattggccctctgcttgtgtgccataccaacactcttaaccctgcacatggcagacaagtcactgtgcaggagtttgccctcttcttcaccatctttgatgaaacaaagtcctggtacttcacagaaaacatggaaaggaactgcagagccccttgcaacatccagatggaggaccccaccttcaaggaaaactacaggtttcatgccatcaatgggtacatcatggacaccctgcctggactggtcatggcccaggaccagaggatcagatggtatctgctcagcatgggaagcaatgagaacatccactccattcacttcagtggtcatgtgttcactgtcaggaaaaaggaggagtacaagatggccctctacaacctttaccctggagtgtttgaaactgtggaaatgctgccatccaaggctggcatctggagggtggaatgcctcattggtgaacacctccatgctggaatgtccaccctcttcctggtgtacagcaacaagtgccagacccccctgggaatggcttcagggcacatcagagacttccagatcactgcctctgggcagtatggacagtgggcccctaagctggccaggctccactactctggaagcatcaatgcctggtccactaaggagcccttctcctggatcaaagtggatctgctggcccccatgatcatccatggcattaagacccagggggccagacagaagttctcctccctctacataagccagttcattatcatgtacagcctggatgggaagaagtggcagacctacaggggcaactccactggaaccctgatggtgttctttgggaatgtggacagctcaggcatcaagcacaacatcttcaaccccccaatcattgccagatacatcaggctccaccccacccactacagcatcagatccaccctgagaatggaacttatgggctgtgacctcaactcctgtagcatgcccctgggcatggagtccaaggccatttcagatgcccaaatcactgcatcctcctacttcaccaacatgtttgccacttggagcccttccaaggccagactgcatctgcaaggcagatccaatgcctggaggccccaggtcaacaaccctaaggaatggctccaggtggacttccaaaagactatgaaagtcactggagtgaccacccagggagtgaagtccctgctgacctctatgtatgtgaaggaattcctcatctcctcaagccaagatggacaccagtggaccctgttcttccaaaatggaaaggtcaaagtgttccagggcaaccaggacagcttcacccctgtggtgaactccttggacccccccctgttgaccagatacctgaggatccacccccagtcctgggtccaccagattgccttgagaatggaggtgctgggctgtgaagcccaggacctctactaattaattaagagcatcttaccgccatttattcccatatttgttctgtttttcttgatttgggtatacatttaaatgttaataaaacaaaatggtggggcaatcatttacatttttagggatatgtaattactagttcaggtgtattgccacaagacaaacatgttaagaaactttcccgttatttacgctctgttcctgttaatcaacctctggattacaaaatttgtgaaagattgactgatattcttaactatgttgctccttttacgctgtgtggatatgctgctttatagcctctgtatctagctattgcttcccgtacggctttcgttttctcctccttgtataaatcctggttgctgtctcttttagaggagttgtggcccgttgtccgtcaacgtggcgtggtgtgctctgtgtttgctgacgcaacccccactggctggggcattgccaccacctgtcaactcctttctgggactttcgctttccccctcccgatcgccacggcagaactcatcgccgcctgccttgcccgctgctggacaggggctaggttgctgggcactgataattccgtggtgttgtctgtgccttctagttgccagccatctgttgtttgcccctcccccgtgccttccttgaccctggaaggtgccactcccactgtcctttcctaataaaatgaggaaattgcatcgcattgtctgagtaggtgtcattctattctggggggtggggtggggcaggacagcaagggggaggattgggaagacaatagcaggcatgctggggatgcggtgggctctatggctctagagcatggctacgtagataagtagcatggcgggttaatcattaactacacctgcaggaggaacccctagtgatggagttggccactccctctctgcgcgctcgctcgctcactgaggccgggcgaccaaaggtcgcccgacgcccgggcggcctcagtgagcgagcgagcgcgcagctgcctgcagg

SEQ ID NO: 69 - DNA, 5996 bp, Artificial Sequence
  Description of Artificial Sequence: Synthetic polynucleotide
cctgcaggcagctgcgcgctcgctcgctcactgaggccgcccgggcaaagcccgggcgtcgggcgacctttggtcgcccggcctcagtgagcgagcgagcgcgcagagagggagtggccaactccatcactaggggttccttgtagttaatgattaacccgccatgctacttatcgcggccgccgggggaggctgctggtgaatattaaccaaggtcaccccagttatcggaggagcaaacaggggctaagtccacacgcgtggtaccgtctgtctgcacatttcgtagagcgagtgttccgatactctaatctccctaggcaaggttcatatttgtgtaggttacttattctccttttgttgactaagtcaataatcagaatcagcaggtttggagtcagcttggcagggatcagcagcctgggttggaaggagggggtataaaagccccttcaccaggagaagccgtcacacagatccacaagctcctgaagaggtaagggtttaagggatggttggttggtggggtattaatgtttaattacctggagcacctgcctgaaatcactttttttcaggttggtttaaacgccgccaccatgcagattgaactgtcgacatgcttcttcttgtgtcttttgagattctgtttttccgctactcggagatactacttgggagccgtggaactgtcctgggactacatgcaatccgacttgggagagctgcctgtggacgcgcgcttcccgccgcgcgtgccgaagtccttcccattcaacaccagcgtggtgtacaaaaagacgctgttcgtggagtttaccgaccatctgttcaatatcgcaaagcctcgccccccctggatgggtttgctcgggcccaccatccaagccgaagtgtatgacaccgtggtcatcacactgaagaacatggccagccacccagtgtcgctgcacgcagtgggcgtgtcctactggaaagcctccgaaggggcggagtacgacgaccagacttcgcagagagaaaaggaggacgacaaggttttccctgggggatcccacacctacgtgtggcaagtgctgaaggaaaatggacccatggcgtccgatccgctgtgtctgacttactcctacctgagccacgtggaccttgtgaaagacctgaactcaggcctgatcggagccctgctggtctgccgcgagggaagcctggcgaaggaaaagactcaaaccctccacaagttcattctgctgttcgcggtgtttgatgagggaaagagctggcactccgaaaccaagaacagcctgatgcaggaccgagatgctgcctccgcccgggcctggcccaagatgcacactgtgaacggctacgttaaccgctccctgcccggacttatcggatgccaccggaagtcagtgtattggcacgtgatcggcatggggaccaccccggaggtgcactccatcttcctggagggacacaccttccttgtgcggaaccacagacaggcatcactggaaatctccccgattaccttcctgaccgctcagaccctgctgatggacctcggtcaattcctcctctcatgccacatttcaagccatcagcatgacgggatggaagcctacgtgaaggtcgactcctgccctgaggaaccacagctgcggatgaagaacaacgaagaggctgaggactacgatgatgacctgaccgacagcgaaatggatgtcgtgcggttcgatgacgacaacagccccagcttcattcaaatccgctccgtggccaagaagcatccgaaaacttgggtgcactacatcgctgccgaggaagaggattgggattacgccccactcgtgctggcccccgacgaccggtcctacaagtcccagtacctgaacaacgggcctcagcgcatcggtcggaagtacaagaaggtccgcttcatggcctacacggacgaaaccttcaagacaagagaagcaattcagcacgaatccggtattctgggacctctgctgtacggggaggtcggagacacccttctcattatctttaagaaccaggcatcgcggccttataacatctatcctcacggaatcaccgatgtcagacctctctactcccggaggctccctaagggtgtcaagcacctgaaagatttccccatcctgcccggagagatcttcaagtacaagtggaccgtcaccgtcgaggacggccccactaagtcagacccgagatgtttgacacggtactacagctcgttcgtgaacatggagcgggatctggccagcggactgattggtccactcctgatctgctacaaggaatccgtggatcagaggggcaatcagatcatgtccgacaagcggaacgtgatattgttctcggtattcgacgaaaaccggtcgtggtacctcaccgagaacatccagcgctttctgcctaaccccgccggcgtgcagctcgaggacccggaattccaggcctctaacattatgcatagcatcaatggttacgtgttcgattccctgcaactgtccgtgtgcctccacgaagtggcttattggtacatcctctcgattggcgcccagactgatttcctgagcgtgttcttctccggctatactttcaagcataagatggtgtacgaggacaccctgaccctgttcccgttttcgggagagactgtgttcatgtccatggagaacccgggactgtggattctcggttgccacaactccgacttccgcaaccgcggcatgaccgcgctgctcaaagtgtcgtcctgcgacaagaacaccggcgattattacgaggactcgtacgaagatattagcgcctaccttctgtcgaagaacaatgccatcgagccaagatcgtttagccagaacagccgccacccctccacccgacaaaagcaattcaacgccaccacgatcccggaaaacacaacgctgcagtccgaccaggaagagattgattacgatgatactatctccgtcgagatgaagaaagaggacttcgacatctacgacgaggacgaaaaccagagcccccgctccttccaaaagaaaactcgccactattttatcgccgccgtggagaggctgtgggattacggaatgtcatccagcccgcatgtgctgcggaacagggcccagagcggatccgtgccacaattcaagaaagtggtgttccaagaattcaccgatgggtcattcacccaaccgctgtaccgcggagagttgaacgaacacttgggccttttgggaccttacattcgggccgaggtcgaggataacatcatggtgacctttaggaaccaagcttcccgcccctactcattctactcatctctgatctcctacgaagaggatcagcggcagggcgccgaaccgagaaagaacttcgtcaagcctaacgaaactaagacttacttctggaaagtgcagcaccacatggcccctaccaaggacgagttcgactgcaaggcctgggcgtacttctccgacgtggacttggaaaaggacgtgcattcggggctgatcggcccgctgttagtgtgtcacaccaacactctgaaccccgcccacggacgccaggtcaccgtgcaagaattcgcgctgttcttcaccattttcgacgaaaccaagtcgtggtacttcactgaaaacatggaacgcaactgcagagccccatgcaacattcagatggaggacccgacctttaaggagaattaccggttccatgccatcaacggatacatcatggacactctccccggtctggtcatggcccaggatcagagaatccggtggtacctcctgagcatgggctccaacgagaatatccacagcatacacttctccggacacgtgttcactgtgcggaagaaggaagagtacaagatggccctgtacaacctgtacccaggggtgtttgaaaccgtggaaatgttgccgtccaaggctggaatttggcgcgtggaatgcctgattggggagcatctgcacgcgggaatgtccaccctgttcctcgtctactccaacaagtgccaaactccgctgggaatggcctcgggacacatcagagacttccagatcaccgcctccgggcagtacggccagtgggccccgaagctcgcccgcctgcattactccggttccatcaacgcctggtcgaccaaggagccattctcctggattaaggtcgatctgctggcaccgatgatcatccacggcatcaagacccagggcgctagacaaaagttcagctccctgtacattagccagttcatcatcatgtactcactggacgggaagaagtggcagacctaccgcggcaattccaccggaactctgatggtgttctttggcaacgtcgacagctcgggaatcaagcacaacattttcaaccctccgatcatcgcccgctacattagactccaccctacccactattcaatccggtccaccctccggatggagctcatgggctgcgacctcaacagttgttccatgccgctggggatggaatccaaggccatctccgatgctcaaattacggctagctcctatttcaccaacatgttcgcgacctggtcgccgtctaaagccagactgcatctacaaggccggtccaatgcgtggcgcccccaagtcaacaacccgaaggagtggctccaggtcgactttcaaaagactatgaaagtcaccggagtgactactcagggagtgaagtcacttctcacttctatgtacgtgaaggaattcctgatctcgtcgtcccaagacggtcatcagtggactctcttcttccaaaacggcaaagtcaaggtgttccagggcaaccaggactccttcacccccgtcgtgaactcccttgatccccctctgctgactcgctacctgaggatccaccctcagtcctgggtgcaccagatcgcactcaggatggaagtgttgggctgcgaggcccaggacctgtactaattaattaagagcatcttaccgccatttattcccatatttgttctgtttttcttgatttgggtatacatttaaatgttaataaaacaaaatggtggggcaatcatttacatttttagggatatgtaattactagttcaggtgtattgccacaagacaaacatgttaagaaactttcccgttatttacgctctgttcctgttaatcaacctctggattacaaaatttgtgaaagattgactgatattcttaactatgttgctccttttacgctgtgtggatatgctgctttatagcctctgtatctagctattgcttcccgtacggctttcgttttctcctccttgtataaatcctggttgctgtctcttttagaggagttgtggcccgttgtccgtcaacgtggcgtggtgtgctctgtgtttgctgacgcaacccccactggctggggcattgccaccacctgtcaactcctttctgggactttcgctttccccctcccgatcgccacggcagaactcatcgccgcctgccttgcccgctgctggacaggggctaggttgctgggcactgataattccgtggtgttgtctgtgccttctagttgccagccatctgttgtttgcccctcccccgtgccttccttgaccctggaaggtgccactcccactgtcctttcctaataaaatgaggaaattgcatcgcattgtctgagtaggtgtcattctattctggggggtggggtggggcaggacagcaagggggaggattgggaagacaatagcaggcatgctggggatgcggtgggctctatggctctagagcatggctacgtagataagtagcatggcgggttaatcattaactacacctgcaggaggaacccctagtgatggagttggccactccctctctgcgcgctcgctcgctcactgaggccgggcgaccaaaggtcgcccgacgcccgggcggcctcagtgagcgagcgagcgcgcagctgcctgcagg

SEQ ID NO: 70 - DNA, 5996 bp, Artificial Sequence
  Description of Artificial Sequence: Synthetic polynucleotide
cctgcaggcagctgcgcgctcgctcgctcactgaggccgcccgggcaaagcccgggcgtcgggcgacctttggtcgcccggcctcagtgagcgagcgagcgcgcagagagggagtggccaactccatcactaggggttccttgtagttaatgattaacccgccatgctacttatcgcggccgccgggggaggctgctggtgaatattaaccaaggtcaccccagttatcggaggagcaaacaggggctaagtccacacgcgtggtaccgtctgtctgcacatttcgtagagcgagtgttccgatactctaatctccctaggcaaggttcatatttgtgtaggttacttattctccttttgttgactaagtcaataatcagaatcagcaggtttggagtcagcttggcagggatcagcagcctgggttggaaggagggggtataaaagccccttcaccaggagaagccgtcacacagatccacaagctcctgaagaggtaagggtttaagggatggttggttggtggggtattaatgtttaattacctggagcacctgcctgaaatcactttttttcaggttggtttaaacgccgccaccatgcaaattgaactgtccacctgtttcttcctgtgcttgctcagattctgcttcagtgccaccagaagatactacctgggggctgttgagctgtcatgggactacatgcagagtgacctgggagagctccctgtggatgccaggttcccaccaagagtccccaagtccttccccttcaacacctcagtggtgtacaaaaagaccctctttgtggagttcactgaccacctgttcaacattgccaagcccagacccccctggatgggcctcttgggccctaccatccaagctgaagtgtatgacactgtggtgatcaccctgaagaacatggcctcccaccctgtgtccctgcatgctgtgggagtcagctactggaaggcctcagagggggcagaatatgatgaccagaccagccagagagaaaaggaagatgacaaggtgttccctgggggatcccacacctatgtgtggcaagtgctcaaggaaaatggtcccatggcctcagaccctctgtgtctgacctactcctacctctcccatgtggacctggtcaaggacctgaactcaggcttaattggagccctgcttgtgtgcagggagggttcccttgctaaggaaaagacccagaccctgcacaagttcatcctgctgtttgctgtctttgatgagggaaagtcctggcactcagaaactaagaacagcctgatgcaggacagggatgctgcctcagccagagcctggcccaagatgcacactgtgaatggttatgtgaacagaagcttgcctggcctcattggatgccacagaaaatcagtctactggcatgtcattggcatgggaaccacccctgaggtccacagcatcttcctggagggccataccttccttgtgagaaaccatagacaggcctcccttgaaatctcccccatcaccttcctcactgcccaaaccctcctcatggacttgggccagttcctcttgagctgccacatctccagccatcagcatgatggaatggaagcctatgtgaaggtggactcctgccctgaggagccccagctgagaatgaaaaacaatgaggaggcagaggattatgatgatgacctgactgactcagagatggatgtggtcaggtttgatgatgacaactccccttccttcattcaaattaggagtgtggccaagaaacaccccaaaacctgggtccactacattgcagcagaggaagaggactgggactatgcaccactggtgctggcccctgatgacaggtcctacaagtcccagtacctgaacaatggcccccagaggattggaagaaagtacaagaaagtcaggttcatggcctacactgatgaaaccttcaagaccagagaagccatccagcatgagtcaggcatcctgggaccacttctctatggggaagtgggggacaccctgctgatcatcttcaaaaaccaggcctccagaccctacaacatctacccccatggcatcactgatgtcaggcccctctactcaagaaggctgcccaagggagtcaagcaccttaaggacttccccattctgcctggagagatcttcaagtacaagtggactgtgactgtggaagatgggccaaccaagtcagaccccagatgcctgaccagatactacagcagctttgtcaacatggagagggacctggcctcaggactcattggtccactcctgatctgctacaaggaatcagtggaccagaggggaaaccagatcatgtcagacaagaggaatgtgatcctgttctctgtgtttgatgagaacaggtcctggtacctgacagaaaacatccagaggttcctgcctaacccagctggagtgcagctggaggacccagagttccaagcctccaacatcatgcacagcatcaatggatatgtgtttgacagccttcaactgtcagtgtgcctccatgaagtggcctactggtacatactgtccattggagcccagactgacttcctgtctgtgttcttctctggatacaccttcaagcacaagatggtgtatgaggacacactgaccctgttccctttctctggggaaactgtgttcatgagcatggagaaccctggcctgtggatcctgggctgccacaactcagacttcagaaacagagggatgactgccctgctgaaggtgtcctcctgtgacaagaacactggagactactatgaggactcctatgaggacatctcagcatacctcttgagcaagaacaatgccattgaacccaggagcttctcccaaaactccagacacccaagcaccagacaaaagcaattcaatgctaccaccattcctgaaaacacaaccctgcagtcagaccaggaggaaattgactatgatgacactatttctgtggaaatgaagaaggaggactttgacatctatgatgaagatgaaaaccagtcccctaggagcttccagaagaaaaccaggcactactttatagcagcagtggagagactgtgggactatggaatgtcctcctcccctcatgtgctgagaaacagagcccagtcaggatcagtgccccagttcaagaaggtggtgttccaggaattcactgatggatccttcacccaacccctgtacagaggggaattgaatgagcacctgggcctgctgggaccctacattagggctgaagtggaggacaacatcatggtcaccttcagaaaccaggcatccagaccttacagcttctacagctccctgatctcctatgaagaggaccagagacagggagctgagcccagaaagaactttgtcaagcccaatgagactaagacctacttctggaaagtgcagcaccacatggcccccaccaaggatgaatttgactgcaaggcctgggcctacttctctgatgtggatctggaaaaggatgtgcactctggtctgattggcccccttctggtctgccacaccaacactctgaaccctgcccatggtagacaggtcactgtgcaagagtttgccctcttcttcaccatctttgatgaaaccaagtcctggtacttcactgaaaacatggaaagaaactgcagggccccctgcaacatccaaatggaggaccccaccttcaaggagaactacaggttccatgccatcaatggctacatcatggataccctgcctggactggtcatggcccaggaccagaggatcagatggtacctcctgagcatgggcagcaatgagaacattcactccatccactttagtgggcatgtgttcactgtcaggaagaaggaagagtacaagatggccctgtacaacctgtaccctggagtgtttgagactgtggagatgctgcccagcaaagctggaatctggagggtggaatgcctgattggtgaacacctccatgctggaatgtccaccctcttcctggtgtactccaacaagtgccagactcctttggggatggcctcagggcacattagggacttccagatcactgcatcaggacagtatggccaatgggccccaaagctggccagactgcactactctggttccatcaatgcctggtccaccaaggaaccattctcctggatcaaggtggacctcctggcccccatgattattcatggaatcaagacccagggagccaggcagaagttctccagcctctacatcagccagttcatcatcatgtactcccttgatggaaagaagtggcagacctacagaggaaactccactggcaccctgatggtgttctttggcaatgtggactcctctggtatcaagcacaacatcttcaaccctccaatcattgccagatacatcagactgcacccaacccactactccattaggtccaccctgaggatggaactcatgggctgtgacctcaactcctgctccatgcctctgggcatggaatccaaggccatctcagatgcacaaattactgcctcctcctacttcaccaacatgtttgccacatggagcccttccaaggccaggctgcacctccaaggcagaagcaatgcctggaggccccaggtcaacaaccccaaggaatggctccaggtagacttccaaaagaccatgaaggtcactggagtcaccacccagggagtgaagtccctgctgacctctatgtatgtgaaggaattcctaatcagcagctcccaggatggtcaccagtggacccttttcttccaaaatgggaaagtgaaggtgttccaaggcaaccaggacagcttcacccctgtggtcaacagccttgaccctcccctgttgactagatacctcagaatccacccccagtcctgggtgcaccagattgccctgagaatggaagtgctgggctgtgaagcccaggacttgtactaattaattaagagcatcttaccgccatttattcccatatttgttctgtttttcttgatttgggtatacatttaaatgttaataaaacaaaatggtggggcaatcatttacatttttagggatatgtaattactagttcaggtgtattgccacaagacaaacatgttaagaaactttcccgttatttacgctctgttcctgttaatcaacctctggattacaaaatttgtgaaagattgactgatattcttaactatgttgctccttttacgctgtgtggatatgctgctttatagcctctgtatctagctattgcttcccgtacggctttcgttttctcctccttgtataaatcctggttgctgtctcttttagaggagttgtggcccgttgtccgtcaacgtggcgtggtgtgctctgtgtttgctgacgcaacccccactggctggggcattgccaccacctgtcaactcctttctgggactttcgctttccccctcccgatcgccacggcagaactcatcgccgcctgccttgcccgctgctggacaggggctaggttgctgggcactgataattccgtggtgttgtctgtgccttctagttgccagccatctgttgtttgcccctcccccgtgccttccttgaccctggaaggtgccactcccactgtcctttcctaataaaatgaggaaattgcatcgcattgtctgagtaggtgtcattctattctggggggtggggtggggcaggacagcaagggggaggattgggaagacaatagcaggcatgctggggatgcggtgggctctatggctctagagcatggctacgtagataagtagcatggcgggttaatcattaactacacctgcaggaggaacccctagtgatggagttggccactccctctctgcgcgctcgctcgctcactgaggccgggcgaccaaaggtcgcccgacgcccgggcggcctcagtgagcgagcgagcgcgcagctgcctgcagg

SEQ ID NO: 71 - DNA, 5013 bp, Artificial Sequence
  Description of Artificial Sequence: Synthetic polynucleotide
atgcaaattgagttaagtacctgttttttcctgtgcctgttgagattttgcttctctgctaccagaaggtattacctgggagctgtggagctgtcatgggactacatgcagtctgacctgggagagctccctgttgatgctaggtttccccctagggtgccaaagtcctttccttttaacacctcagtggtgtacaagaagacactgtttgtggagtttactgaccacctcttcaatattgctaagccaagacccccttggatgggtctcttgggccctaccatccaggctgaggtttatgatacagtggtgattaccctcaagaatatggcttctcatcctgttagtctgcatgcagtaggggtcagctattggaaggccagtgaaggagctgagtatgatgaccagaccagccagagagagaaagaggatgacaaggtgttccctgggggatcacacacctatgtgtggcaggtgttgaaggaaaatggacccatggcctctgacccactctgcctgacttactcctacctgtctcatgtggacctggtcaaagatctgaactctggcctgattggggcactgttggtgtgcagagaagggtctcttgccaaggagaagactcagaccctgcacaagttcatcctgctgtttgctgtgtttgatgaaggcaagtcttggcattctgagactaagaacagcctgatgcaagatagagatgctgcatctgccagggcctggcctaagatgcacactgtgaatggatatgtgaataggtccttgcctggcctgattggatgccataggaagtctgtgtactggcatgtgattggcatgggcaccacccctgaggttcactctatttttctggagggccatactttccttgtgaggaatcatagacaggcctctctggagattagccctattacatttctgactgctcagaccctcctcatggacttggggcagtttctgttaagctgccacatcagcagccatcaacatgatggtatggaagcctatgtcaaagtggatagctgccctgaagaaccacagcttaggatgaagaacaatgaggaggcagaggactatgatgatgatctgactgattctgaaatggatgtggtgagatttgatgatgataatagcccttcctttatccagatcaggtcagtggccaagaagcacccaaagacctgggtgcattatattgctgctgaggaggaggactgggactatgcccctctggtgctggcccctgatgatagaagctataagtctcaatacttgaataatggcccacagaggattgggagaaagtacaaaaaggtgagatttatggcctacactgatgagactttcaagaccagagaggccatccagcatgaatcaggcattttgggtcccctgctgtatggagaggtgggggataccctgctgatcatctttaagaaccaggccagcagaccttacaacatttaccctcatgggatcacagatgtgaggccactctactctaggagattgcccaagggagtcaagcatcttaaggactttccaatcctgcctggggagatcttcaagtacaaatggacagtgacagttgaggatggacctactaagagtgaccccaggtgtctgaccagatattactctagctttgtcaatatggaaagagacctggcttcaggcttgataggccctcttctcatctgctacaaagagtctgtggaccagagaggaaatcagattatgtctgacaagagaaatgttattctgttttcagtctttgatgagaacagaagttggtacttgacagagaacattcagagatttctgcctaaccctgcaggagtgcagcttgaggaccctgagtttcaggcttccaatatcatgcattctatcaatggctatgtgtttgatagcctgcagctgtctgtgtgcctgcatgaggttgcctattggtacatcctgtctattggggcccaaactgatttcttgtctgtgtttttcagtggatatacctttaagcataagatggtgtatgaagataccttgacacttttccctttctcaggagagactgtcttcatgtctatggagaaccctggactgtggatcctgggatgccacaactcagacttcagaaacaggggtatgacagctctgcttaaggtctcctcatgtgacaaaaatacaggagactactatgaagattcctatgaggacatctctgcttacctgctcagcaaaaacaatgccattgagcccagaagcttcagccagaattccagacatcccagtactaggcagaagcagtttaatgccaccaccatcccagaaaatgacattgagaagacagacccttggtttgcccatagaaccccaatgcccaagattcagaatgtgagcagctcagacttgctgatgctgctgaggcagtctcctactccccatggcctgtccctctcagatctgcaggaagccaagtatgagacattttctgatgacccctccccaggggctattgacagtaacaacagcctgtctgaaatgacccacttcagacctcagctccaccacagtggggatatggtgtttaccccagagtcaggcctgcagctgagactgaatgagaagctgggaaccacagctgccacagaactgaagaagctggatttcaaggtgagctctacttcaaataatctgatttccactatcccatctgacaatttggcagctggcactgacaatacaagctctctgggcccacctagcatgccagtgcattatgacagccagttggacaccactctttttggaaagaaatccagtcccctgacagagtcaggaggacccctttctctgtctgaggagaacaatgatagtaagcttctggagtcaggcttgatgaactcccaggagagttcttggggcaagaatgtgagctctagggagatcaccagaaccactctgcagtctgaccaagaagagattgattatgatgacactatctctgttgagatgaagaaggaggactttgatatctatgatgaggatgagaaccagtctccaagaagtttccagaagaagaccaggcactactttattgctgctgtggagagactgtgggactatggaatgtcctcctcccctcatgtcctgagaaatagagctcagtcaggatcagtgccccagttcaagaaggtggtgttccaggaattcacagatggaagttttacccagccactgtatagaggtgaactgaatgaacatctgggtctgctggggccctatatcagggctgaggtggaggacaatattatggtgacctttagaaaccaggcctcaaggccctacagcttctactcttccctcatttcatatgaggaagaccagagacagggagcagagcctagaaagaactttgtcaagcccaatgaaaccaaaacctatttctggaaggtgcagcaccacatggcacccaccaaagatgagtttgactgcaaagcctgggcctatttctcagatgtggatctggagaaggatgtccattcaggtctgattggaccactcctggtgtgccacaccaacacactgaatccagctcatggcagacaggtgacagtccaggagtttgccctgtttttcactatttttgatgagaccaagagctggtattttacagagaatatggaaagaaactgcagagccccttgtaatatccagatggaggacccaacctttaaggagaactacaggttccatgccatcaatggctacattatggataccctgcctggcctggttatggcccaggatcagaggatcaggtggtatctgctgtcaatgggctccaatgagaacattcatagtattcacttttcaggacatgtgttcacagtgagaaagaaggaggagtataagatggccctctataatctctacccaggggtgtttgagacagttgagatgctgccatctaaggcaggcatctggagagtggaatgcctcattggagagcacctgcatgctggcatgtccaccctgtttctggtgtactccaacaaatgtcagacccctcttggtatggcctctggccacattagggatttccagattactgccagtggtcagtatgggcagtgggcccctaagctggccagactgcactattctgggagcatcaatgcctggtccaccaaggaacctttttcttggattaaagtggatctgctggccccaatgatcatccatgggatcaagacccagggagctaggcagaagttcagcagcctgtacattagtcagttcatcattatgtacagtctggatggcaaaaagtggcagacatacaggggcaattccactggaaccctgatggtgttctttggaaatgtggatagcagtggtatcaagcacaacattttcaaccctcccatcattgccaggtacatcagactgcatccaacccactacagcattaggagcacccttaggatggagctcatggggtgtgacctgaactcttgctctatgccacttggaatggagagcaaggccatctctgatgcccagattactgctagttcctacttcaccaatatgtttgccacctggtcacccagcaaggccaggctgcacctgcagggaaggtccaatgcttggaggcctcaggtgaacaatccaaaggagtggctgcaggtggacttccagaagactatgaaggtgacaggagtgaccactcagggagtgaagagcctgctgacctccatgtatgtgaaggagtttctgatctccagctcccaggatggccaccagtggaccctgttctttcagaatggcaaggtgaaggtgtttcaggggaatcaggactccttcaccccagtggtgaattccctggatccccctctgctgaccagatacctgagaatccacccccagtcttgggtgcaccagattgcccttaggatggaggtgctgggctgtgaggcccaggacctgtactga

SEQ ID NO: 72 - DNA, 5013 bp, Artificial Sequence
  Description of Artificial Sequence: Synthetic polynucleotide
atgcaaattgagttatccacctgtttcttcctctgtctcctgaggttctgcttctctgccaccaggagatactacctgggggctgtggagctgtcctgggactacatgcagtcagacctgggggagctgccagttgatgccaggttcccccccagagtccccaagtccttccccttcaacacctcagtggtgtacaaaaagaccctgtttgtggagttcacagaccacctgttcaacatagccaagcccaggcccccctggatgggcctgctgggccccaccatccaggcagaggtttatgacacagtggtcatcaccctgaagaacatggcctcccaccctgtgtccctccatgctgtgggggtgagctactggaaggccagtgagggggcagaatatgatgaccagaccagccagagggagaaggaggatgacaaggtgttcccagggggcagccacacctatgtgtggcaggtcctgaaggagaatggccccatggcctctgaccccctctgcctcacctactcctacctgtcccatgtggacctggtgaaggacctcaactctggcctgattggagccctcctggtgtgcagggaggggagcctggccaaggaaaagacccagaccctgcacaagtttatcctgctctttgcagtctttgatgaggggaagtcctggcacagtgagaccaagaactccctgatgcaggacagagatgctgcctcagccagggcctggcccaagatgcacacagtgaatgggtatgtcaacaggagcctgccaggcctgattgggtgccacagaaagtcagtgtactggcatgtcattggcatgggcaccaccccagaggtgcactccatcttcctggagggccacaccttcctggtgaggaaccacagacaggccagcctggagatcagcccaatcaccttcctcacagcccagaccctcctcatggacctgggccagtttctcctgagctgccacatctcctcccaccagcatgatggcatggaggcctatgtgaaggtggacagctgccctgaggagccccagctcaggatgaagaacaatgaggaggcagaggactatgatgatgatctgacagactctgagatggatgtggtgagatttgatgatgacaacagcccctccttcatccagatcaggtctgtggccaagaagcaccctaagacctgggtgcactacattgcagctgaggaggaggactgggactatgcccccctggtcctggcccctgatgataggtcctacaagtcccagtacctgaacaatggcccccagaggatagggagaaagtacaagaaggtgaggttcatggcctacactgatgagaccttcaagactagggaagccatccagcatgagtctgggatcctgggccccctcctctatggggaggtgggggacaccctgctgatcatcttcaagaaccaggccagcaggccctacaacatttacccccatgggatcacagatgtgagacccctgtacagcaggagactgccaaagggggtgaagcacctgaaggacttccccatcctgccaggggagatcttcaagtacaagtggactgtgacagtggaggatgggcccaccaaatctgaccctagatgcctgaccagatactacagcagctttgtgaacatggagagggacctggcctctggactgattggccctctgctgatctgctacaaggagagtgtggaccagaggggaaaccagatcatgtctgacaagaggaatgtgatcctgttctcagtgtttgatgagaacagatcctggtacctcactgagaacatccagaggttcctgcccaacccagcaggggtgcagctggaggacccagagttccaggcctccaacatcatgcactccatcaatggctatgtctttgactccctgcagctgtcagtgtgcctgcatgaggtggcctactggtacatcctctccattggagcccagactgacttcctgtcagtcttcttcagtggctacaccttcaagcacaagatggtctatgaggacactctgaccctgttccccttctctggggagactgtgttcatgtccatggagaaccctggactgtggatcctgggctgccacaacagtgacttcaggaacaggggcatgactgccctgctgaaggtctccagctgtgacaagaacactggggactactatgaggactcctatgaggacatctctgcctacctgctgtccaagaacaatgccattgagcccaggtccttctcccagaacagcagacacccctccaccaggcagaagcagttcaatgcaaccaccatccctgaaaatgatattgagaagacagacccctggtttgctcacaggacccccatgcccaagatccagaatgtgagctcctctgacctgctgatgctgctgaggcagtctcctaccccccatgggctgtccctgagtgacctgcaggaggccaagtatgagaccttctcagatgaccccagcccaggagccattgattccaacaacagcctgtcagagatgacccacttcaggccccagctgcaccactctggggacatggtgttcacccctgagtctgggctgcagctgaggctgaatgagaagctgggcaccactgcagccacagagctcaagaagctggactttaaggtgagctccaccagcaacaacctgatcagcacaatccctagtgacaatctggctgctggcacagacaacacctcctccctgggcccccccagcatgcctgtgcactatgactcccagctggacaccaccctgtttgggaagaagtccagccccctgacagagtcagggggccccctgtccctctctgaggagaacaatgacagtaagctgctggagagtgggctgatgaactcccaggagtcctcctggggaaagaatgtctccagcagggagatcaccaggaccaccctgcagagtgaccaggaggagattgactatgatgacaccatctctgtggagatgaagaaggaggactttgacatctatgatgaggatgagaaccagagccctagaagcttccagaagaagaccagacactacttcattgctgcagtggaaagactgtgggactatgggatgagctcctccccccatgtgctgaggaacagggcccagtctggctctgtgccccagttcaagaaggtggtgttccaggagttcactgatggctccttcacccagcccctgtacaggggagagctgaatgagcacctgggcctgctgggcccctacatcagggctgaggtggaggacaatatcatggtgaccttcagaaaccaggcctccagaccttactccttctacagcagcctgatctcctatgaggaggaccagagacagggggctgagcccaggaagaactttgtgaagcccaatgagaccaagacctacttctggaaggtgcagcaccacatggcccccaccaaggatgagtttgactgcaaggcctgggcctacttctctgatgtggacctggagaaggatgtgcactctggcctgattggccccctgctggtgtgccacaccaacaccctgaaccctgcccatggcaggcaggtgactgtgcaggagtttgccctgttcttcaccatctttgatgagaccaagagctggtacttcactgagaacatggagaggaactgcagggccccctgcaacatccagatggaggaccccaccttcaaggagaactacaggttccatgccatcaatggctacatcatggacaccctgcctggcctggtgatggcccaggaccagaggatcaggtggtacctgctgagcatggggagcaatgagaacatccacagcatccacttctctggccatgtgttcacagtgaggaagaaggaggagtacaagatggccctgtacaacctgtaccctggggtgtttgagacagtggagatgctgccctccaaggctggaatctggagggtggagtgcctgattggggagcacctgcatgctggcatgagcaccctgttcctggtgtacagcaacaagtgccagacccccctgggcatggcctctggccacatcagagacttccagatcacagcctcaggccagtatggccagtgggcccccaagctggccaggctgcactactctggcagcatcaatgcctggtccaccaaggagcccttcagctggatcaaggtggacctcctggcccccatgatcatccatggcatcaagacccagggggccaggcagaagttcagctccctgtacatctcccagttcatcatcatgtactccctggatggcaagaagtggcagacctacagaggcaacagcacaggcaccctgatggtgttctttggcaatgtggacagctctgggatcaagcacaacatcttcaacccccccatcattgccaggtacatcagactgcaccccacccactactccatcaggtccaccctgagaatggagctgatgggctgtgacctgaacagctgcagcatgcccctgggcatggagagcaaggccatctctgatgcccagatcacagccagcagctacttcaccaacatgtttgccacctggtcccccagcaaggccaggctgcacctgcagggcaggagcaatgcctggaggccccaggtgaacaaccccaaggagtggctgcaggtggacttccagaagaccatgaaggtgacaggggtgaccacccagggggtgaagtccctgctgaccagcatgtatgtgaaggagttcctgatcagcagctcccaggatggccaccagtggaccctgttcttccagaatggcaaggtgaaggtgttccagggcaaccaggacagcttcacccctgtggtgaactccctggacccccccctgctgaccagatacctgaggatccacccccagtcctgggtgcaccagattgccctgagaatggaggtgctgggctgtgaggcccaggacctgtactga

SEQ ID NO: 73 - DNA, 5013 bp, Artificial Sequence
  Description of Artificial Sequence: Synthetic polynucleotide
atgcagattgagctgagcacctgcttcttcctgtgcctgctgaggttctgcttctctgccaccaggagatactacctgggggctgtggagctgagctgggactacatgcagtctgacctgggggagctgcctgtggatgccaggttcccccccagagtgcccaagagcttccccttcaacacctctgtggtgtacaagaagaccctgtttgtggagttcactgaccacctgttcaacattgccaagcccaggcccccctggatgggcctgctgggccccaccatccaggctgaggtgtatgacactgtggtgatcaccctgaagaacatggccagccaccctgtgagcctgcatgctgtgggggtgagctactggaaggcctctgagggggctgagtatgatgaccagaccagccagagggagaaggaggatgacaaggtgttccctgggggcagccacacctatgtgtggcaggtgctgaaggagaatggccccatggcctctgaccccctgtgcctgacctacagctacctgagccatgtggacctggtgaaggacctgaactctggcctgattggggccctgctggtgtgcagggagggcagcctggccaaggagaagacccagaccctgcacaagttcatcctgctgtttgctgtgtttgatgagggcaagagctggcactctgaaaccaagaacagcctgatgcaggacagggatgctgcctctgccagggcctggcccaagatgcacactgtgaatggctatgtgaacaggagcctgcctggcctgattggctgccacaggaagtctgtgtactggcatgtgattggcatgggcaccacccctgaggtgcacagcatcttcctggagggccacaccttcctggtcaggaaccacaggcaggccagcctggagatcagccccatcaccttcctgactgcccagaccctgctgatggacctgggccagttcctgctgagctgccacatcagcagccaccagcatgatggcatggaggcctatgtgaaggtggacagctgccctgaggagccccagctgaggatgaagaacaatgaggaggctgaggactatgatgatgacctgactgactctgagatggatgtggtgaggtttgatgatgacaacagccccagcttcatccagatcaggtctgtggccaagaagcaccccaagacctgggtgcactacattgctgctgaggaggaggactgggactatgcccccctggtgctggcccctgatgacaggagctacaagagccagtacctgaacaatggcccccagaggattggcaggaagtacaagaaggtcaggttcatggcctacactgatgaaaccttcaagaccagggaggccatccagcatgagtctggcatcctgggccccctgctgtatggggaggtgggggacaccctgctgatcatcttcaagaaccaggccagcaggccctacaacatctacccccatggcatcactgatgtgaggcccctgtacagcaggaggctgcccaagggggtgaagcacctgaaggacttccccatcctgcctggggagatcttcaagtacaagtggactgtgactgtggaggatggccccaccaagtctgaccccaggtgcctgaccagatactacagcagctttgtgaacatggagagggacctggcctctggcctgattggccccctgctgatctgctacaaggagtctgtggaccagaggggcaaccagatcatgtctgacaagaggaatgtgatcctgttctctgtgtttgatgagaacaggagctggtacctgactgagaacatccagaggttcctgcccaaccctgctggggtgcagctggaggaccctgagttccaggccagcaacatcatgcacagcatcaatggctatgtgtttgacagcctgcagctgtctgtgtgcctgcatgaggtggcctactggtacatcctgagcattggggcccagactgacttcctgtctgtgttcttctctggctacaccttcaagcacaagatggtgtatgaggacaccctgaccctgttccccttctctggggagactgtgttcatgagcatggagaaccctggcctgtggattctgggctgccacaactctgacttcaggaacaggggcatgactgccctgctgaaagtctccagctgtgacaagaacactggggactactatgaggacagctatgaggacatctctgcctacctgctgagcaagaacaatgccattgagcccaggagcttcagccagaatagcaggcaccccagcaccaggcagaagcagttcaatgccaccaccatcccagagaatgatattgagaagactgacccttggtttgcccacaggacccccatgccaaagattcagaatgtgtcctcatctgacttgctgatgctgctgaggcagagccccacaccccatgggctgagcctgtctgacctgcaggaggccaaatatgaaaccttttcagatgaccccagcccaggagccattgacagtaacaacagcctgtctgagatgacccacttcaggccccagctccatcactctggggacatggtgttcaccccagagtcaggcctgcagctgaggctgaatgagaagctgggcaccacagcagccactgagctgaagaagctggactttaaggtgtccagcacctccaacaacctgatcagcaccatcccctctgacaacctggcagctggcactgataacacctccagcctgggcccaccttctatgcctgtgcactatgacagccaactggacaccaccctgtttgggaagaagtcctctccactgacagagtctggagggcccctgtccctgtctgaggagaacaatgactccaagctgctggagtctgggctgatgaacagtcaggagagctcctggggaaagaatgtgtccagcagggagatcaccaggaccaccctgcagtctgaccaggaggagattgactatgatgacaccatctctgtggagatgaagaaggaggactttgacatctacgacgaggacgagaaccagagccccaggagcttccagaagaagaccaggcactacttcattgctgctgtggagaggctgtgggactatggcatgagcagcagcccccatgtgctgaggaacagggcccagtctggctctgtgccccagttcaagaaggtggtgttccaggagttcactgatggcagcttcacccagcccctgtacagaggggagctgaatgagcacctgggcctgctgggcccctacatcagggctgaggtggaggacaacatcatggtgaccttcaggaaccaggccagcaggccctacagcttctacagcagcctgatcagctatgaggaggaccagaggcagggggctgagcccaggaagaactttgtgaagcccaatgaaaccaagacctacttctggaaggtgcagcaccacatggcccccaccaaggatgagtttgactgcaaggcctgggcctacttctctgatgtggacctggagaaggatgtgcactctggcctgattggccccctgctggtgtgccacaccaacaccctgaaccctgcccatggcaggcaggtgactgtgcaggagtttgccctgttcttcaccatctttgatgaaaccaagagctggtacttcactgagaacatggagaggaactgcagggccccctgcaacatccagatggaggaccccaccttcaaggagaactacaggttccatgccatcaatggctacatcatggacaccctgcctggcctggtgatggcccaggaccagaggatcaggtggtacctgctgagcatgggcagcaatgagaacatccacagcatccacttctctggccatgtgttcactgtgaggaagaaggaggagtacaagatggccctgtacaacctgtaccctggggtgtttgagactgtggagatgctgcccagcaaggctggcatctggagggtggagtgcctgattggggagcacctgcatgctggcatgagcaccctgttcctggtgtacagcaacaagtgccagacccccctgggcatggcctctggccacatcagggacttccagatcactgcctctggccagtatggccagtgggcccccaagctggccaggctgcactactctggcagcatcaatgcctggagcaccaaggagcccttcagctggatcaaggtggacctgctggcccccatgatcatccatggcatcaagacccagggggccaggcagaagttcagcagcctgtacatcagccagttcatcatcatgtacagcctggatggcaagaagtggcagacctacaggggcaacagcactggcaccctgatggtgttctttggcaatgtggacagctctggcatcaagcacaacatcttcaacccccccatcattgccagatacatcaggctgcaccccacccactacagcatcaggagcaccctgaggatggagctgatgggctgtgacctgaacagctgcagcatgcccctgggcatggagagcaaggccatctctgatgcccagatcactgccagcagctacttcaccaacatgtttgccacctggagccccagcaaggccaggctgcacctgcagggcaggagcaatgcctggaggccccaggtcaacaaccccaaggagtggctgcaggtggacttccagaagaccatgaaggtgactggggtgaccacccagggggtgaagagcctgctgaccagcatgtatgtgaaggagttcctgatcagcagcagccaggatggccaccagtggaccctgttcttccagaatggcaaggtgaaggtgttccagggcaaccaggacagcttcacccctgtggtgaacagcctggacccccccctgctgaccagatacctgaggattcacccccagagctgggtgcaccagattgccctgaggatggaggtgctgggctgtgaggcccaggacctgtactga

SEQ ID NO: 74 - DNA, 4392 bp, Artificial Sequence
  Description of Artificial Sequence: Synthetic polynucleotide
atgcaaattgagttatccacctgtttcttcctctgtctcctgaggttctgcttctctgccaccaggagatactacctgggggctgtggagctgtcctgggactacatgcagtcagacctgggggagctgccagttgatgccaggttcccccccagagtccccaagtccttccccttcaacacctcagtggtgtacaaaaagaccctgtttgtggagttcacagaccacctgttcaacatagccaagcccaggcccccctggatgggcctgctgggccccaccatccaggcagaggtttatgacacagtggtcatcaccctgaagaacatggcctcccaccctgtgtccctccatgctgtgggggtgagctactggaaggccagtgagggggcagaatatgatgaccagaccagccagagggagaaggaggatgacaaggtgttcccagggggcagccacacctatgtgtggcaggtcctgaaggagaatggccccatggcctctgaccccctctgcctcacctactcctacctgtcccatgtggacctggtgaaggacctcaactctggcctgattggagccctcctggtgtgcagggaggggagcctggccaaggaaaagacccagaccctgcacaagtttatcctgctctttgcagtctttgatgaggggaagtcctggcacagtgagaccaagaactccctgatgcaggacagagatgctgcctcagccagggcctggcccaagatgcacacagtgaatgggtatgtcaacaggagcctgccaggcctgattgggtgccacagaaagtcagtgtactggcatgtcattggcatgggcaccaccccagaggtgcactccatcttcctggagggccacaccttcctggtgaggaaccacagacaggccagcctggagatcagcccaatcaccttcctcacagcccagaccctcctcatggacctgggccagtttctcctgttctgccacatctcctcccaccagcatgatggcatggaggcctatgtgaaggtggacagctgccctgaggagccccagctcaggatgaagaacaatgaggaggcagaggactatgatgatgatctgacagactctgagatggatgtggtgagatttgatgatgacaacagcccctccttcatccagatcaggtctgtggccaagaagcaccctaagacctgggtgcactacattgcagctgaggaggaggactgggactatgcccccctggtcctggcccctgatgataggtcctacaagtcccagtacctgaacaatggcccccagaggatagggagaaagtacaagaaggtgaggttcatggcctacactgatgagaccttcaagactagggaagccatccagcatgagtctgggatcctgggccccctcctctatggggaggtgggggacaccctgctgatcatcttcaagaaccaggccagcaggccctacaacatttacccccatgggatcacagatgtgagacccctgtacagcaggagactgccaaagggggtgaagcacctgaaggacttccccatcctgccaggggagatcttcaagtacaagtggactgtgacagtggaggatgggcccaccaaatctgaccctagatgcctgaccagatactacagcagctttgtgaacatggagagggacctggcctctggactgattggccctctgctgatctgctacaaggagagtgtggaccagaggggaaaccagatcatgtctgacaagaggaatgtgatcctgttctcagtgtttgatgagaacagatcctggtacctcactgagaacatccagaggttcctgcccaacccagcaggggtgcagctggaggacccagagttccaggcctccaacatcatgcactccatcaatggctatgtctttgactccctgcagctgtcagtgtgcctgcatgaggtggcctactggtacatcctctccattggagcccagactgacttcctgtcagtcttcttcagtggctacaccttcaagcacaagatggtctatgaggacactctgaccctgttccccttctctggggagactgtgttcatgtccatggagaaccctggactgtggatcctgggctgccacaacagtgacttcaggaacaggggcatgactgccctgctgaaggtctccagctgtgacaagaacactggggactactatgaggactcctatgaggacatctctgcctacctgctgtccaagaacaatgccattgagcccaggtccttctcccagaacagcagacacccctccaccaggcagaagcagttcaatgcaaccaccatccctgaaaataccaccctgcagagtgaccaggaggagattgactatgatgacaccatctctgtggagatgaagaaggaggactttgacatctatgatgaggatgagaaccagagccctagaagcttccagaagaagaccagacactacttcattgctgcagtggaaagactgtgggactatgggatgagctcctccccccatgtgctgaggaacagggcccagtctggctctgtgccccagttcaagaaggtggtgttccaggagttcactgatggctccttcacccagcccctgtacaggggagagctgaatgagcacctgggcctgctgggcccctacatcagggctgaggtggaggacaatatcatggtgaccttcagaaaccaggcctccagaccttactccttctacagcagcctgatctcctatgaggaggaccagagacagggggctgagcccaggaagaactttgtgaagcccaatgagaccaagacctacttctggaaggtgcagcaccacatggcccccaccaaggatgagtttgactgcaaggcctgggcctacttctctgatgtggacctggagaaggatgtgcactctggcctgattggccccctgctggtgtgccacaccaacaccctgaaccctgcccatggcaggcaggtgactgtgcaggagtttgccctgttcttcaccatctttgatgagaccaagagctggtacttcactgagaacatggagaggaactgcagggccccctgcaacatccagatggaggaccccaccttcaaggagaactacaggttccatgccatcaatggctacatcatggacaccctgcctggcctggtgatggcccaggaccagaggatcaggtggtacctgctgagcatggggagcaatgagaacatccacagcatccacttctctggccatgtgttcacagtgaggaagaaggaggagtacaagatggccctgtacaacctgtaccctggggtgtttgagacagtggagatgctgccctccaaggctggaatctggagggtggagtgcctgattggggagcacctgcatgctggcatgagcaccctgttcctggtgtacagcaacaagtgccagacccccctgggcatggcctctggccacatcagagacttccagatcacagcctcaggccagtatggccagtgggcccccaagctggccaggctgcactactctggcagcatcaatgcctggtccaccaaggagcccttcagctggatcaaggtggacctcctggcccccatgatcatccatggcatcaagacccagggggccaggcagaagttcagctccctgtacatctcccagttcatcatcatgtactccctggatggcaagaagtggcagacctacagaggcaacagcacaggcaccctgatggtgttctttggcaatgtggacagctctgggatcaagcacaacatcttcaacccccccatcattgccaggtacatcagactgcaccccacccactactccatcaggtccaccctgagaatggagctgatgggctgtgacctgaacagctgcagcatgcccctgggcatggagagcaaggccatctctgatgcccagatcacagccagcagctacttcaccaacatgtttgccacctggtcccccagcaaggccaggctgcacctgcagggcaggagcaatgcctggaggccccaggtgaacaaccccaaggagtggctgcaggtggacttccagaagaccatgaaggtgacaggggtgaccacccagggggtgaagtccctgctgaccagcatgtatgtgaaggagttcctgatcagcagctcccaggatggccaccagtggaccctgttcttccagaatggcaaggtgaaggtgttccagggcaaccaggacagcttcacccctgtggtgaactccctggacccccccctgctgaccagatacctgaggatccacccccagtcctgggtgcaccagattgccctgagaatggaggtgctgggctgtgaggcccaggacctgtactga

SEQ ID NO: 75 - DNA, 4392 bp, Artificial Sequence
  Description of Artificial Sequence: Synthetic polynucleotide
atgcaaattgagttatccacctgtttcttcctctgtctcctgaggttctgcttctctgccaccaggagatactacctgggggctgtggagctgtcctgggactacatgcagtcagacctgggggagctgccagttgatgccaggttcccccccagagtccccaagtccttccccttcaacacctcagtggtgtacaaaaagaccctgtttgtggagttcacagaccacctgttcaacatagccaagcccaggcccccctggatgggcctgctgggccccaccatccaggcagaggtttatgacacagtggtcatcaccctgaagaacatggcctcccaccctgtgtccctccatgctgtgggggtgagctactggaaggccagtgagggggcagaatatgatgaccagaccagccagagggagaaggaggatgacaaggtgttcccagggggcagccacacctatgtgtggcaggtcctgaaggagaatggccccatggcctctgaccccctctgcctcacctactcctacctgtcccatgtggacctggtgaaggacctcaactctggcctgattggagccctcctggtgtgcagggaggggagcctggccaaggaaaagacccagaccctgcacaagtttatcctgctctttgcagtctttgatgaggggaagtcctggcacagtgagaccaagaactccctgatgcaggacagagatgctgcctcagccagggcctggcccaagatgcacacagtgaatgggtatgtcaacaggagcctgccaggcctgattgggtgccacagaaagtcagtgtactggcatgtcattggcatgggcaccaccccagaggtgcactccatcttcctggagggccacaccttcctggtgaggaaccacagacaggccagcctggagatcagcccaatcaccttcctcacagcccagaccctcctcatggacctgggccagtttctcctgagctgccacatctcctcccaccagcatgatggcatggaggcctatgtgaaggtggacagctgccctgaggagccccagctcaggatgaagaacaatgaggaggcagaggactatgatgatgatctgacagactctgagatggatgtggtgagatttgatgatgacaacagcccctccttcatccagatcaggtctgtggccaagaagcaccctaagacctgggtgcactacattgcagctgaggaggaggactgggactatgcccccctggtcctggcccctgatgataggtcctacaagtcccagtacctgaacaatggcccccagaggatagggagaaagtacaagaaggtgaggttcatggcctacactgatgagaccttcaagactagggaagccatccagcatgagtctgggatcctgggccccctcctctatggggaggtgggggacaccctgctgatcatcttcaagaaccaggccagcaggccctacaacatttacccccatgggatcacagatgtgagacccctgtacagcaggagactgccaaagggggtgaagcacctgaaggacttccccatcctgccaggggagatcttcaagtacaagtggactgtgacagtggaggatgggcccaccaaatctgaccctagatgcctgaccagatactacagcagctttgtgaacatggagagggacctggcctctggactgattggccctctgctgatctgctacaaggagagtgtggaccagaggggaaaccagatcatgtctgacaagaggaatgtgatcctgttctcagtgtttgatgagaacagatcctggtacctcactgagaacatccagaggttcctgcccaacccagcaggggtgcagctggaggacccagagttccaggcctccaacatcatgcactccatcaatggctatgtctttgactccctgcagctgtcagtgtgcctgcatgaggtggcctactggtacatcctctccattggagcccagactgacttcctgtcagtcttcttcagtggctacaccttcaagcacaagatggtctatgaggacactctgaccctgttccccttctctggggagactgtgttcatgtccatggagaaccctggactgtggatcctgggctgccacaacagtgacttcaggaacaggggcatgactgccctgctgaaggtctccagctgtgacaagaacactggggactactatgaggactcctatgaggacatctctgcctacctgctgtccaagaacaatgccattgagcccaggtccttctcccagaacagcagacacccctccaccaggcagaagcagttcaatgcaaccaccatccctgaaaataccaccctgcagagtgaccaggaggagattgactatgatgacaccatctctgtggagatgaagaaggaggactttgacatctatgatgaggatgagaaccagagccctagaagcttccagaagaagaccagacactacttcattgctgcagtggaaagactgtgggactatgggatgagctcctccccccatgtgctgaggaacagggcccagtctggctctgtgccccagttcaagaaggtggtgttccaggagttcactgatggctccttcacccagcccctgtacaggggagagctgaatgagcacctgggcctgctgggcccctacatcagggctgaggtggaggacaatatcatggtgaccttcagaaaccaggcctccagaccttactccttctacagcagcctgatctcctatgaggaggaccagagacagggggctgagcccaggaagaactttgtgaagcccaatgagaccaagacctacttctggaaggtgcagcaccacatggcccccaccaaggatgagtttgactgcaaggcctgggcctacttctctgatgtggacctggagaaggatgtgcactctggcctgattggccccctgctggtgtgccacaccaacaccctgaaccctgcccatggcaggcaggtgactgtgcaggagtttgccctgttcttcaccatctttgatgagaccaagagctggtacttcactgagaacatggagaggaactgcagggccccctgcaacatccagatggaggaccccaccttcaaggagaactacaggttccatgccatcaatggctacatcatggacaccctgcctggcctggtgatggcccaggaccagaggatcaggtggtacctgctgagcatggggagcaatgagaacatccacagcatccacttctctggccatgtgttcacagtgaggaagaaggaggagtacaagatggccctgtacaacctgtaccctggggtgtttgagacagtggagatgctgccctccaaggctggaatctggagggtggagtgcctgattggggagcacctgcatgctggcatgagcaccctgttcctggtgtacagcaacaagtgccagacccccctgggcatggcctctggccacatcagagacttccagatcacagcctcaggccagtatggccagtgggcccccaagctggccaggctgcactactctggcagcatcaatgcctggtccaccaaggagcccttcagctggatcaaggtggacctcctggcccccatgatcatccatggcatcaagacccagggggccaggcagaagttcagctccctgtacatctcccagttcatcatcatgtactccctggatggcaagaagtggcagacctacagaggcaacagcacaggcaccctgatggtgttctttggcaatgtggacagctctgggatcaagcacaacatcttcaacccccccatcattgccaggtacatcagactgcaccccacccactactccatcaggtccaccctgagaatggagctgatgggctgtgacctgaacagctgcagcatgcccctgggcatggagagcaaggccatctctgatgcccagatcacagccagcagctacttcaccaacatgtttgccacctggtcccccagcaaggccaggctgcacctgcagggcaggagcaatgcctggaggccccaggtgaacaaccccaaggagtggctgcaggtggacttccagaagaccatgaaggtgacaggggtgaccacccagggggtgaagtccctgctgaccagcatgtatgtgaaggagttcctgatcagcagctcccaggatggccaccagtggaccctgttcttccagaatggcaaggtgaaggtgttccagggcaaccaggacagcttcacccctgtggtgaactccctggacccccccctgctgaccagatacctgaggatccacccccagtcctgggtgcaccagattgccctgagaatggaggtgctgggctgtgaggcccaggacctgtactga

SEQ ID NO: 76 - DNA, 4392 bp, Artificial Sequence
  Description of Artificial Sequence: Synthetic polynucleotide
atgcagattgagctgagcacctgcttcttcctgtgcctgctgaggttctgcttctctgccaccaggagatactacctgggggctgtggagctgagctgggactacatgcagtctgacctgggggagctgcctgtggatgccaggttcccccccagagtgcccaagagcttccccttcaacacctctgtggtgtacaagaagaccctgtttgtggagttcactgaccacctgttcaacattgccaagcccaggcccccctggatgggcctgctgggccccaccatccaggctgaggtgtatgacactgtggtgatcaccctgaagaacatggccagccaccctgtgagcctgcatgctgtgggggtgagctactggaaggcctctgagggggctgagtatgatgaccagaccagccagagggagaaggaggatgacaaggtgttccctgggggcagccacacctatgtgtggcaggtgctgaaggagaatggccccatggcctctgaccccctgtgcctgacctacagctacctgagccatgtggacctggtgaaggacctgaactctggcctgattggggccctgctggtgtgcagggagggcagcctggccaaggagaagacccagaccctgcacaagttcatcctgctgtttgctgtgtttgatgagggcaagagctggcactctgaaaccaagaacagcctgatgcaggacagggatgctgcctctgccagggcctggcccaagatgcacactgtgaatggctatgtgaacaggagcctgcctggcctgattggctgccacaggaagtctgtgtactggcatgtgattggcatgggcaccacccctgaggtgcacagcatcttcctggagggccacaccttcctggtcaggaaccacaggcaggccagcctggagatcagccccatcaccttcctgactgcccagaccctgctgatggacctgggccagttcctgctgttctgccacatcagcagccaccagcatgatggcatggaggcctatgtgaaggtggacagctgccctgaggagccccagctgaggatgaagaacaatgaggaggctgaggactatgatgatgacctgactgactctgagatggatgtggtgaggtttgatgatgacaacagccccagcttcatccagatcaggtctgtggccaagaagcaccccaagacctgggtgcactacattgctgctgaggaggaggactgggactatgcccccctggtgctggcccctgatgacaggagctacaagagccagtacctgaacaatggcccccagaggattggcaggaagtacaagaaggtcaggttcatggcctacactgatgaaaccttcaagaccagggaggccatccagcatgagtctggcatcctgggccccctgctgtatggggaggtgggggacaccctgctgatcatcttcaagaaccaggccagcaggccctacaacatctacccccatggcatcactgatgtgaggcccctgtacagcaggaggctgcccaagggggtgaagcacctgaaggacttccccatcctgcctggggagatcttcaagtacaagtggactgtgactgtggaggatggccccaccaagtctgaccccaggtgcctgaccagatactacagcagctttgtgaacatggagagggacctggcctctggcctgattggccccctgctgatctgctacaaggagtctgtggaccagaggggcaaccagatcatgtctgacaagaggaatgtgatcctgttctctgtgtttgatgagaacaggagctggtacctgactgagaacatccagaggttcctgcccaaccctgctggggtgcagctggaggaccctgagttccaggccagcaacatcatgcacagcatcaatggctatgtgtttgacagcctgcagctgtctgtgtgcctgcatgaggtggcctactggtacatcctgagcattggggcccagactgacttcctgtctgtgttcttctctggctacaccttcaagcacaagatggtgtatgaggacaccctgaccctgttccccttctctggggagactgtgttcatgagcatggagaaccctggcctgtggattctgggctgccacaactctgacttcaggaacaggggcatgactgccctgctgaaagtctccagctgtgacaagaacactggggactactatgaggacagctatgaggacatctctgcctacctgctgagcaagaacaatgccattgagcccaggagcttcagccagaatagcaggcaccccagcaccaggcagaagcagttcaatgccaccaccatcccagagaataccaccctgcagtctgaccaggaggagattgactatgatgacaccatctctgtggagatgaagaaggaggactttgacatctacgacgaggacgagaaccagagccccaggagcttccagaagaagaccaggcactacttcattgctgctgtggagaggctgtgggactatggcatgagcagcagcccccatgtgctgaggaacagggcccagtctggctctgtgccccagttcaagaaggtggtgttccaggagttcactgatggcagcttcacccagcccctgtacagaggggagctgaatgagcacctgggcctgctgggcccctacatcagggctgaggtggaggacaacatcatggtgaccttcaggaaccaggccagcaggccctacagcttctacagcagcctgatcagctatgaggaggaccagaggcagggggctgagcccaggaagaactttgtgaagcccaatgaaaccaagacctacttctggaaggtgcagcaccacatggcccccaccaaggatgagtttgactgcaaggcctgggcctacttctctgatgtggacctggagaaggatgtgcactctggcctgattggccccctgctggtgtgccacaccaacaccctgaaccctgcccatggcaggcaggtgactgtgcaggagtttgccctgttcttcaccatctttgatgaaaccaagagctggtacttcactgagaacatggagaggaactgcagggccccctgcaacatccagatggaggaccccaccttcaaggagaactacaggttccatgccatcaatggctacatcatggacaccctgcctggcctggtgatggcccaggaccagaggatcaggtggtacctgctgagcatgggcagcaatgagaacatccacagcatccacttctctggccatgtgttcactgtgaggaagaaggaggagtacaagatggccctgtacaacctgtaccctggggtgtttgagactgtggagatgctgcccagcaaggctggcatctggagggtggagtgcctgattggggagcacctgcatgctggcatgagcaccctgttcctggtgtacagcaacaagtgccagacccccctgggcatggcctctggccacatcagggacttccagatcactgcctctggccagtatggccagtgggcccccaagctggccaggctgcactactctggcagcatcaatgcctggagcaccaaggagcccttcagctggatcaaggtggacctgctggcccccatgatcatccatggcatcaagacccagggggccaggcagaagttcagcagcctgtacatcagccagttcatcatcatgtacagcctggatggcaagaagtggcagacctacaggggcaacagcactggcaccctgatggtgttctttggcaatgtggacagctctggcatcaagcacaacatcttcaacccccccatcattgccagatacatcaggctgcaccccacccactacagcatcaggagcaccctgaggatggagctgatgggctgtgacctgaacagctgcagcatgcccctgggcatggagagcaaggccatctctgatgcccagatcactgccagcagctacttcaccaacatgtttgccacctggagccccagcaaggccaggctgcacctgcagggcaggagcaatgcctggaggccccaggtcaacaaccccaaggagtggctgcaggtggacttccagaagaccatgaaggtgactggggtgaccacccagggggtgaagagcctgctgaccagcatgtatgtgaaggagttcctgatcagcagcagccaggatggccaccagtggaccctgttcttccagaatggcaaggtgaaggtgttccagggcaaccaggacagcttcacccctgtggtgaacagcctggacccccccctgctgaccagatacctgaggattcacccccagagctgggtgcaccagattgccctgaggatggaggtgctgggctgtgaggcccaggacctgtactga

SEQ ID NO: 77 - DNA, 4392 bp, Artificial Sequence
  Description of Artificial Sequence: Synthetic polynucleotide
atgcagattgagctgagcacctgcttcttcctgtgcctgctgaggttctgcttctctgccaccaggagatactacctgggggctgtggagctgagctgggactacatgcagtctgacctgggggagctgcctgtggatgccaggttcccccccagagtgcccaagagcttccccttcaacacctctgtggtgtacaagaagaccctgtttgtggagttcactgaccacctgttcaacattgccaagcccaggcccccctggatgggcctgctgggccccaccatccaggctgaggtgtatgacactgtggtgatcaccctgaagaacatggccagccaccctgtgagcctgcatgctgtgggggtgagctactggaaggcctctgagggggctgagtatgatgaccagaccagccagagggagaaggaggatgacaaggtgttccctgggggcagccacacctatgtgtggcaggtgctgaaggagaatggccccatggcctctgaccccctgtgcctgacctacagctacctgagccatgtggacctggtgaaggacctgaactctggcctgattggggccctgctggtgtgcagggagggcagcctggccaaggagaagacccagaccctgcacaagttcatcctgctgtttgctgtgtttgatgagggcaagagctggcactctgaaaccaagaacagcctgatgcaggacagggatgctgcctctgccagggcctggcccaagatgcacactgtgaatggctatgtgaacaggagcctgcctggcctgattggctgccacaggaagtctgtgtactggcatgtgattggcatgggcaccacccctgaggtgcacagcatcttcctggagggccacaccttcctggtcaggaaccacaggcaggccagcctggagatcagccccatcaccttcctgactgcccagaccctgctgatggacctgggccagttcctgctgagctgccacatcagcagccaccagcatgatggcatggaggcctatgtgaaggtggacagctgccctgaggagccccagctgaggatgaagaacaatgaggaggctgaggactatgatgatgacctgactgactctgagatggatgtggtgaggtttgatgatgacaacagccccagcttcatccagatcaggtctgtggccaagaagcaccccaagacctgggtgcactacattgctgctgaggaggaggactgggactatgcccccctggtgctggcccctgatgacaggagctacaagagccagtacctgaacaatggcccccagaggattggcaggaagtacaagaaggtcaggttcatggcctacactgatgaaaccttcaagaccagggaggccatccagcatgagtctggcatcctgggccccctgctgtatggggaggtgggggacaccctgctgatcatcttcaagaaccaggccagcaggccctacaacatctacccccatggcatcactgatgtgaggcccctgtacagcaggaggctgcccaagggggtgaagcacctgaaggacttccccatcctgcctggggagatcttcaagtacaagtggactgtgactgtggaggatggccccaccaagtctgaccccaggtgcctgaccagatactacagcagctttgtgaacatggagagggacctggcctctggcctgattggccccctgctgatctgctacaaggagtctgtggaccagaggggcaaccagatcatgtctgacaagaggaatgtgatcctgttctctgtgtttgatgagaacaggagctggtacctgactgagaacatccagaggttcctgcccaaccctgctggggtgcagctggaggaccctgagttccaggccagcaacatcatgcacagcatcaatggctatgtgtttgacagcctgcagctgtctgtgtgcctgcatgaggtggcctactggtacatcctgagcattggggcccagactgacttcctgtctgtgttcttctctggctacaccttcaagcacaagatggtgtatgaggacaccctgaccctgttccccttctctggggagactgtgttcatgagcatggagaaccctggcctgtggattctgggctgccacaactctgacttcaggaacaggggcatgactgccctgctgaaagtctccagctgtgacaagaacactggggactactatgaggacagctatgaggacatctctgcctacctgctgagcaagaacaatgccattgagcccaggagcttcagccagaatagcaggcaccccagcaccaggcagaagcagttcaatgccaccaccatcccagagaataccaccctgcagtctgaccaggaggagattgactatgatgacaccatctctgtggagatgaagaaggaggactttgacatctacgacgaggacgagaaccagagccccaggagcttccagaagaagaccaggcactacttcattgctgctgtggagaggctgtgggactatggcatgagcagcagcccccatgtgctgaggaacagggcccagtctggctctgtgccccagttcaagaaggtggtgttccaggagttcactgatggcagcttcacccagcccctgtacagaggggagctgaatgagcacctgggcctgctgggcccctacatcagggctgaggtggaggacaacatcatggtgaccttcaggaaccaggccagcaggccctacagcttctacagcagcctgatcagctatgaggaggaccagaggcagggggctgagcccaggaagaactttgtgaagcccaatgaaaccaagacctacttctggaaggtgcagcaccacatggcccccaccaaggatgagtttgactgcaaggcctgggcctacttctctgatgtggacctggagaaggatgtgcactctggcctgattggccccctgctggtgtgccacaccaacaccctgaaccctgcccatggcaggcaggtgactgtgcaggagtttgccctgttcttcaccatctttgatgaaaccaagagctggtacttcactgagaacatggagaggaactgcagggccccctgcaacatccagatggaggaccccaccttcaaggagaactacaggttccatgccatcaatggctacatcatggacaccctgcctggcctggtgatggcccaggaccagaggatcaggtggtacctgctgagcatgggcagcaatgagaacatccacagcatccacttctctggccatgtgttcactgtgaggaagaaggaggagtacaagatggccctgtacaacctgtaccctggggtgtttgagactgtggagatgctgcccagcaaggctggcatctggagggtggagtgcctgattggggagcacctgcatgctggcatgagcaccctgttcctggtgtacagcaacaagtgccagacccccctgggcatggcctctggccacatcagggacttccagatcactgcctctggccagtatggccagtgggcccccaagctggccaggctgcactactctggcagcatcaatgcctggagcaccaaggagcccttcagctggatcaaggtggacctgctggcccccatgatcatccatggcatcaagacccagggggccaggcagaagttcagcagcctgtacatcagccagttcatcatcatgtacagcctggatggcaagaagtggcagacctacaggggcaacagcactggcaccctgatggtgttctttggcaatgtggacagctctggcatcaagcacaacatcttcaacccccccatcattgccagatacatcaggctgcaccccacccactacagcatcaggagcaccctgaggatggagctgatgggctgtgacctgaacagctgcagcatgcccctgggcatggagagcaaggccatctctgatgcccagatcactgccagcagctacttcaccaacatgtttgccacctggagccccagcaaggccaggctgcacctgcagggcaggagcaatgcctggaggccccaggtcaacaaccccaaggagtggctgcaggtggacttccagaagaccatgaaggtgactggggtgaccacccagggggtgaagagcctgctgaccagcatgtatgtgaaggagttcctgatcagcagcagccaggatggccaccagtggaccctgttcttccagaatggcaaggtgaaggtgttccagggcaaccaggacagcttcacccctgtggtgaacagcctggacccccccctgctgaccagatacctgaggattcacccccagagctgggtgcaccagattgccctgaggatggaggtgctgggctgtgaggcccaggacctgtactga

SEQ ID NO: 78 - DNA, 4392 bp, Artificial Sequence
  Description of Artificial Sequence: Synthetic polynucleotide
atgcagattgaactatccacttgcttcttcctgtgtcttttgagattctgcttcagtgccaccaggagatactacctgggagctgtggagctcagctgggactacatgcagtcagacctgggagaactccctgtggatgccagattcccacctagggtgcccaagtccttccccttcaacacctcagtggtgtacaaaaagaccctgtttgtggaattcactgaccatctgttcaacattgccaaacccagaccaccctggatgggactgctgggtcccaccattcaagcagaagtctatgacactgtggtcatcactctcaagaacatggcttcccaccctgtgtccctgcatgctgtgggagtctcctactggaaggcctcagaaggggctgagtatgatgaccagacttcccaaagagaaaaggaggatgacaaggtctttcctggtggaagccacacctatgtttggcaagtcctgaaggaaaatgggcccatggcttcagaccccctgtgccttacctactcctacctgtcccatgtggatcttgtgaaggatctgaactcagggttgattggggcccttcttgtgtgtagggaaggcagccttgccaaggaaaagacccaaaccctccacaaattcattttgctgtttgcagtgtttgatgaaggaaagtcatggcactcagaaaccaagaacagcctcatgcaggacagagatgctgcctcagccagagcctggcccaagatgcacactgtgaatggatatgtgaacaggtccctgcctggattgattggctgccacaggaaatcagtgtactggcatgtcattggcatggggaccaccccagaggtccactccatcttcctggagggacacacctttctggtcagaaaccacagacaagccagcctggagatttcccccatcaccttcctgactgcccagacccttctgatggaccttgggcagttcctgttgttctgtcacattagctcccatcagcatgatggaatggaagcctatgtgaaggttgactcctgccctgaggaaccccaactcaggatgaagaacaatgaggaagcagaggactatgatgatgacctgactgactcagagatggatgttgtcagatttgatgatgacaacagcccctccttcatccaaatcagatctgtggcaaagaaacatcccaaaacctgggtccactacattgctgcagaagaagaggactgggactatgccccactggtgctggccccagatgacaggtcctacaagtcccagtacctgaacaatggacctcagaggattggtagaaagtacaagaaagtcagattcatggcctacactgatgagactttcaagaccagggaagccattcagcatgaatcaggcattctgggccccctgctgtatggagaagtgggagacactctgctgatcatcttcaagaaccaggcatccaggccctacaacatctacccacatgggatcactgatgtcaggcccctctactcaagaaggctccccaagggtgtcaagcacctgaaggactttcccatcctccctggggagatcttcaagtacaagtggactgtgactgtggaggatggcccaactaagtctgacccaagatgcttgaccagatactacagcagttttgtgaacatggagagagatctggcctctggcctgattggtcccctcctcatctgctacaaggaatcagtggaccagagagggaaccagattatgtcagacaagaggaatgtgatcttgttcagtgtatttgatgagaacaggtcctggtacctgactgagaacatccagaggttcctgcctaacccagctggtgtccagcttgaggatccagaattccaagcctcaaacatcatgcactccatcaatggttatgtgtttgacagcctccaactgtcagtgtgcctgcatgaagtggcatactggtacatcctgtccattggagcccaaactgacttcctgtctgtgttcttctctggatacactttcaagcataagatggtgtatgaggacaccctcaccctgttccccttctctggggagactgtctttatgtccatggaaaacccaggactgtggatcctgggctgtcacaactcagacttcagaaacaggggcatgactgccctgctcaaagtgtcctcctgtgacaagaacactggggactactatgaagattcctatgaggacatctcagcttatctgctgtccaagaacaatgccattgagcctaggagcttcagccagaacagcaggcacccctcaactagacagaagcagttcaatgctaccacaatcccagaaaacactacactgcagagtgaccaggaagaaattgattatgatgacactatctcagtggagatgaaaaaggaagattttgacatctatgatgaggatgagaaccaaagccctagaagctttcagaagaaaaccagacactacttcatagcagctgtggagaggctgtgggattatggcatgagctcctccccacatgtgctgagaaacagggcccagtcaggctcagtgccccaattcaagaaggtggtgttccaggagttcactgatggttccttcactcaacctctgtacaggggggagctcaatgagcaccttgggctgctgggaccttacatcagagcagaagtggaggacaacatcatggtcaccttcagaaaccaggcctcaaggccctactccttctactcctccctgatctcctatgaagaagatcagagacagggggctgaacccaggaaaaactttgtgaagcccaatgagactaagacctacttttggaaggtccagcaccacatggctcccaccaaggatgagtttgactgcaaggcctgggcatacttctcagatgtggaccttgaaaaggatgtgcactctggactcattggccccctcctggtctgccacaccaacaccctgaacccagcccatggcagacaagtcactgtgcaggagtttgccctttttttcaccatctttgatgaaaccaagtcctggtacttcactgaaaatatggagagaaactgcagagccccatgcaacatccaaatggaggaccctaccttcaaggagaactacaggttccatgccatcaatggctacatcatggacacactccctggacttgtgatggcccaggaccagagaatcagatggtacctcttgtccatgggcagcaatgagaacattcactccatccacttctctggtcatgtgttcactgttagaaagaaggaagagtacaagatggccctgtacaacctctaccctggagtgtttgaaactgtggaaatgctgcctagcaaggctgggatctggagagtggagtgcctcattggggaacatctgcatgcaggaatgtccacccttttcctggtgtactccaacaagtgccagacccctttgggaatggcatcaggccacatcagagacttccagattacagcctcaggacaatatggacagtgggcccctaagctggccaggctccactactctgggtccatcaatgcctggtccaccaaggaaccttttagctggatcaaagtggacttgctggcccccatgatcatccatggaatcaagactcagggagcaaggcagaagttctcctccctctacattagccaattcattatcatgtacagcctggatggaaagaagtggcagacctacagaggaaactccactggcaccctgatggtgttctttggaaatgtggactcctcaggaatcaagcacaacatcttcaaccctccaattattgccagatacattagactccaccccactcactactccattagaagcaccctcaggatggaactgatgggatgtgacctcaactcctgctccatgcctctgggcatggaaagcaaagccatctcagatgcccagatcactgcatccagctacttcaccaacatgtttgccacctggagcccttccaaagccagactgcatctgcaaggcagatccaatgcatggaggcctcaggtcaacaacccaaaggagtggctccaagtggacttccaaaagaccatgaaggtcacaggagtgaccacccagggagtgaagtccctgttgaccagcatgtatgtgaaggagttcctgatctcatcctcccaagatggccatcagtggactctgttcttccaaaatggcaaagtgaaggtctttcaggggaaccaggattccttcacccctgtggtcaatagcctggatccccctctattaactagatacctgaggatccacccccaaagctgggtgcaccagattgctctgaggatggaagtgttgggctgtgaggcccaagacctgtactaa

SEQ ID NO: 79 - DNA, 4392 bp, Artificial Sequence
  Description of Artificial Sequence: Synthetic polynucleotide
atgcagattgaactctccacctgtttcttcctgtgcctgctgagattctgcttcagtgccaccaggagatactacctgggagctgtggaactgtcctgggactacatgcagtctgacttgggagagctcccagtggatgccaggttcccacctagagtgcccaagtccttccctttcaacacctcagtggtgtacaaaaagactctgtttgtggagttcactgaccacttgttcaacattgccaagccaagacccccctggatggggctactgggccccaccatccaagcagaagtctatgacactgtggtgatcaccctgaaaaacatggcctcccaccctgtgtccctgcatgctgtgggggtgtcctactggaaggcctctgaaggagcagaatatgatgaccagacctcccagagggaaaaggaggatgataaggtgttccctgggggctcccacacttatgtgtggcaagtccttaaggaaaatgggccaatggcctcagaccccctttgcttgacttactcctacctgagccatgtagatcttgtgaaggacctgaactcaggtcttattggagccttgttggtgtgcagggaaggttcactggccaaagaaaagacccagaccctgcacaagttcatcctcctgtttgctgtctttgatgagggaaagtcctggcactcagaaactaagaacagcctgatgcaggacagggatgctgcctctgctagagcctggcctaagatgcatacagtcaatggttatgtcaataggtccctgcctggattgattggatgccacaggaagtcagtgtactggcatgtcattggcatgggaaccactcctgaagtgcactccatcttcctggaagggcacacatttctagttaggaaccacagacaggcctccctggagatcagcccaatcaccttcctgactgcccagaccctcctcatggacctgggacagttcctgctgttctgccacatctcctcacaccagcatgatggaatggaggcctatgtgaaagtggacagctgccctgaggaaccccagctgagaatgaagaacaatgaagaggctgaggattatgatgatgacctcactgactcagagatggatgtggtcagatttgatgatgacaacagccccagctttattcaaatcagatcagtggccaagaagcatcctaagacctgggtgcattacattgctgctgaagaggaagattgggactatgcccccctggtgctggcacctgatgataggtcctacaagagccagtacctgaacaatggaccccagaggattggcaggaagtacaagaaggtcagattcatggcctacactgatgaaaccttcaagaccagagaggccatccagcatgagtcaggaattctgggacccctcctctatggggaagtgggagacaccctgctcatcatcttcaagaaccaggcctccagaccatacaacatctacccccatggaattactgatgtcagaccactgtactccagaagattgccaaagggagtgaagcacctgaaagacttcccaatcttgcctggggaaattttcaagtacaagtggactgtgactgtggaagatgggccaactaagtcagatcccagatgcctcactagatactactcatcctttgtgaacatggagagggacctggcttcaggactgattggcccactgctgatttgttacaaggagtcagtggatcagagaggaaaccagattatgtcagacaagaggaatgtcatcctgttcagtgtgtttgatgagaacaggagttggtacttgactgagaacattcagagattcctgccaaacccagcaggggtgcagttggaggaccctgagttccaggcttccaacatcatgcactctatcaatggctatgtgtttgactccctgcaactctctgtgtgcctgcatgaagtggcctactggtacattctctccattggtgcccagactgatttcctgtcagtgttcttctctggatacactttcaagcacaagatggtgtatgaggacaccctgaccctcttccccttctctggggaaactgtctttatgtccatggaaaaccctggactttggatcctggggtgtcacaacagtgatttcaggaacaggggaatgactgccctgctgaaagtgtcctcctgtgacaagaacactggggactactatgaagattcctatgaagatatctcagcctacctcctctccaaaaacaatgccattgagcctagatccttcagccaaaactccaggcaccccagcaccagacaaaagcaattcaatgcaaccaccatccctgagaacactaccctgcaatcagaccaagaagagattgactatgatgacaccatctcagtggagatgaagaaggaagattttgacatctatgatgaggatgagaaccagagcccaaggtccttccagaaaaagaccaggcactacttcattgcagctgtggaaagactgtgggactatggaatgtcctcctccccacatgtgctgaggaacagagcccagtcaggatcagtgccacagttcaagaaagtggtgttccaagaattcactgatggcagcttcactcagcccctgtacagaggagagctcaatgagcaccttggcctgctgggcccctacattagagctgaagtggaagataacatcatggtcactttcaggaaccaagccagcaggccttactcattctactcctcactgatcagctatgaagaggaccagagacagggagcagagcccagaaagaactttgtgaagccaaatgaaaccaagacctacttctggaaggtccagcaccatatggccccaaccaaggatgagtttgactgcaaggcctgggcctacttcagtgatgtggacctggaaaaggatgtgcactcagggctcattggacctcttctggtctgccataccaacaccctcaaccctgcccatggtagacaagtcactgtgcaagaatttgccctgttcttcaccatttttgatgaaactaaaagctggtacttcacagagaacatggaaagaaactgcagggccccctgcaacatccaaatggaggaccccactttcaaggaaaactacagattccatgccattaatggatacatcatggacaccctgcctggcttagtgatggcccaggaccaaaggatcagatggtacctgttgtccatgggttccaatgagaacatccactccatacatttctcaggacatgtgttcactgtcagaaagaaagaggagtacaagatggccctttacaacctttaccctggggtctttgaaactgtggagatgctgccatccaaggctggcatctggagagtggaatgcctgattggagaacacctccatgctggaatgtccaccctcttcctggtgtactcaaacaagtgccagacccctctgggcatggcctcaggacacattagggacttccagatcactgcctctggccagtatggtcaatgggcccccaagcttgccagactgcattactctgggtccatcaatgcctggagcaccaaggaacctttctcctggatcaaagtggacctcctggcccccatgattatccatggcatcaagacccagggagccaggcagaagttctcctccctgtacattagccaattcatcattatgtacagcctggatggaaagaagtggcagacctacagaggaaacagcactggcaccctgatggtcttttttggcaatgtggacagctctgggatcaagcataacatcttcaaccctcccataattgcaagatacatcaggctgcaccccacccactacagcatcaggtccaccctgagaatggagctcatgggctgtgacctgaacagctgctccatgcctctgggaatggaatccaaagccatctcagatgcccaaatcacagcctcctcctacttcaccaacatgtttgctacctggagcccttccaaagccaggctgcacttacaaggaagaagcaatgcatggaggcctcaggtcaacaaccccaaggagtggctgcaagtggacttccaaaagaccatgaaagtcactggagtgaccactcaaggagtgaagtccctgttgaccagcatgtatgtcaaggaatttctgatctcaagctcccaagatggccatcagtggactctgttcttccaaaatggaaaggtcaaggtgttccagggcaaccaggacagctttacccctgttgtgaactccctggacccccccctgctgactagatacttgagaatccacccccagtcctgggtgcaccagattgcattgagaatggaagtccttggctgtgaagcccaggacctgtactaa

SEQ ID NO: 80 - DNA, 4392 bp, Artificial Sequence
  Description of Artificial Sequence: Synthetic polynucleotide
atgcagattgagctctccacctgtttcttcctttgcctcctgagattctgttttagtgccaccagaagatactacctgggtgctgtggaactctcctgggactacatgcagtcagacctgggtgaactgcctgtggatgccagattccccccaagagtgcccaagtccttccccttcaacacctcagtggtctacaagaaaaccctctttgtggagttcactgaccacctcttcaacattgccaagcctaggcccccatggatgggcctgctgggacccaccatccaagctgaagtgtatgacactgtggtcatcaccctcaagaacatggcctcccaccctgtctccctgcatgctgtgggtgtctcctactggaaggcctcagagggagcagaatatgatgaccaaacctcccagagagaaaaggaagatgacaaggtctttccaggaggctcccatacctatgtgtggcaagtgcttaaggagaatggcccaatggcctcagaccccctctgcctgacctactcctacctctcccatgtggacctggtcaaggacctgaactcaggtcttattggagccctgcttgtgtgcagagagggcagcctggccaaggaaaagacccaaaccctgcacaagttcatcctgctgtttgcagtgtttgatgagggaaagtcctggcactcagaaaccaagaacagcctgatgcaggatagagatgctgcctcagccagggcctggcccaagatgcacactgtgaatggctatgtgaacagaagcctgccaggcttgattggatgtcacaggaagtctgtgtactggcatgtcattggcatgggcaccacccctgaggtgcactccatcttcttggaaggccataccttcttggtcagaaaccataggcaggcctccctggaaatctcccctatcaccttcttgactgcccaaactctcctgatggacctgggccagttcttgctgttctgccacatcagctcacatcagcatgatgggatggaggcctatgtgaaggtggacagctgcccagaagaacctcagttaaggatgaagaacaatgaggaggcagaggactatgatgatgacctgactgactctgagatggatgttgtcagatttgatgatgacaacagcccaagcttcattcagatcagatcagtggccaagaagcaccccaagacttgggtgcactacatagctgcagaggaagaggattgggactatgctcctcttgtgctggcccctgatgacaggagctacaaatcccagtaccttaacaatggcccccagaggattggaaggaagtacaagaaagtcaggttcatggcatacactgatgagactttcaagactagagaggccatccagcatgagtcagggatcctgggcccactgctgtatggagaagtgggggacaccctcctcatcattttcaagaaccaagctagcagaccctataacatctaccctcatgggatcactgatgtcaggcccctgtactcaagaaggctgcctaagggagtgaaacacctgaaggacttccccatcctccctggagagatcttcaagtacaagtggactgtgactgtggaagatggaccaaccaagtcagaccccagatgtctgaccagatactacagctcctttgtcaacatggaaagggacctggcctcagggcttattggaccactgctcatctgttacaaggaatcagtggaccagaggggaaaccagattatgtcagacaagagaaatgtgatcctgttctcagtctttgatgagaacagatcctggtacctgactgaaaacattcaaagattcctgcccaaccctgctggagtgcagctggaggacccagagttccaggcctccaacatcatgcactccattaatggttatgtctttgactccctgcaactgtcagtctgcctgcatgaagtggcctactggtacatcctgagcattggagcccagactgacttcctgtcagtattcttttctggctacaccttcaagcataagatggtgtatgaagataccctcactctgttccccttttctggggaaactgtgttcatgagcatggaaaaccctggactgtggatcctgggttgccacaactcagacttcaggaacagagggatgactgccctgttgaaggtgtcctcctgtgacaagaacactggggactactatgaagatagctatgaggacatctcagcctaccttttgtccaagaacaatgccattgagcccagaagcttcagtcagaacagcagacatcccagcaccaggcagaagcagttcaatgccaccaccattcctgaaaacaccaccctgcaatctgaccaggaggaaattgattatgatgacacaatctctgtggagatgaagaaagaggactttgacatctatgatgaagatgagaaccaatccccaagatccttccagaaaaagaccaggcactacttcattgctgctgtggaaagactctgggactatggaatgagctcctccccccatgtgttgagaaacagagcccagtcaggctcagtgcctcagtttaagaaagtggtgttccaggaattcactgatggatccttcacccaacccctgtacagaggagaacttaatgagcacctgggactgctgggcccctacatcagggctgaagtggaggacaacatcatggtcacattcagaaaccaggcttccagaccttacagcttctactcctccctcatctcctatgaggaggatcagagacagggggctgaacccaggaaaaactttgtcaagcccaatgagactaagacctacttctggaaggtccagcaccacatggcccccactaaggatgaatttgactgcaaggcctgggcatacttctcagatgtggatctggaaaaagatgtgcactcaggactgattggacctctgctggtctgccacaccaacactctgaaccctgcccatggcagacaagtcactgtgcaggagtttgctctctttttcaccatttttgatgaaaccaagtcctggtacttcactgagaacatggagaggaactgcagggccccctgcaacattcagatggaggaccccaccttcaaggagaactacagattccatgccatcaatggttacatcatggacaccctgcctggacttgtcatggcccaagaccagagaattaggtggtacctcctctcaatgggatccaatgagaacatccactccatccacttcagtggacatgtgttcacagtcagaaagaaggaagagtacaagatggccctgtacaacctgtaccctggggtgtttgaaactgtggaaatgctgcccagcaaggctggaatctggagggtggaatgcctgattggggaacacctccatgctggaatgtccaccctttttctggtctactccaacaagtgccagacccctctggggatggcatcaggccacatcagagacttccaaatcacagcctctggacagtatggccaatgggcccctaagctggccaggttgcactactcaggctccatcaatgcctggtccactaaggagcctttctcctggattaaggtggaccttctggcccctatgatcatccatggtatcaagacccagggtgccagacaaaagttctccagcctgtacataagccagttcatcattatgtactccttggatggaaagaagtggcaaacctacaggggcaactccactggtactctcatggtgttctttggaaatgtggactcctctggtatcaagcacaacatcttcaaccctcccatcattgccagatacattagactgcaccccacacactacagcatcagaagcaccctcaggatggaactgatgggctgtgacttgaacagctgcagcatgccattgggaatggaatccaaggctatttcagatgctcagatcactgcctcctcctacttcactaacatgtttgccacctggtccccatcaaaagccaggctgcatctgcagggcagaagcaatgcctggaggccccaagtgaacaacccaaaggaatggcttcaggttgatttccaaaagaccatgaaagtcactggagtgaccacccagggagtgaagtccctgctgacctccatgtatgtgaaagaattcctgatctcatcctcccaagatgggcaccagtggaccctcttcttccaaaatggaaaggtcaaggtgttccaaggaaaccaggactccttcacccctgtggtcaactccctggacccaccactgctgactaggtacctcagaatccatcctcaatcctgggtgcaccagattgccctcagaatggaagtgctgggctgtgaagcacaggacctgtactga

SEQ ID NO: 81 - DNA, 4392 bp, Artificial Sequence
  Description of Artificial Sequence: Synthetic polynucleotide
atgcagattgaactgtcgacatgcttcttcttgtgtcttttgagattctgtttttccgctactcggagatactacttgggagccgtggaactgtcctgggactacatgcaatccgacttgggagagctgcctgtggacgcgcgcttcccgccgcgcgtgccgaagtccttcccattcaacaccagcgtggtgtacaaaaagacgctgttcgtggagtttaccgaccatctgttcaatatcgcaaagcctcgccccccctggatgggtttgctcgggcccaccatccaagccgaagtgtatgacaccgtggtcatcacactgaagaacatggccagccacccagtgtcgctgcacgcagtgggcgtgtcctactggaaagcctccgaaggggcggagtacgacgaccagacttcgcagagagaaaaggaggacgacaaggttttccctgggggatcccacacctacgtgtggcaagtgctgaaggaaaatggacccatggcgtccgatccgctgtgtctgacttactcctacctgagccacgtggaccttgtgaaagacctgaactcaggcctgatcggagccctgctggtctgccgcgagggaagcctggcgaaggaaaagactcaaaccctccacaagttcattctgctgttcgcggtgtttgatgagggaaagagctggcactccgaaaccaagaacagcctgatgcaggaccgagatgctgcctccgcccgggcctggcccaagatgcacactgtgaacggctacgttaaccgctccctgcccggacttatcggatgccaccggaagtcagtgtattggcacgtgatcggcatggggaccaccccggaggtgcactccatcttcctggagggacacaccttccttgtgcggaaccacagacaggcatcactggaaatctccccgattaccttcctgaccgctcagaccctgctgatggacctcggtcaattcctcctcttttgccacatttcaagccatcagcatgacgggatggaagcctacgtgaaggtcgactcctgccctgaggaaccacagctgcggatgaagaacaacgaagaggctgaggactacgatgatgacctgaccgacagcgaaatggatgtcgtgcggttcgatgacgacaacagccccagcttcattcaaatccgctccgtggccaagaagcatccgaaaacttgggtgcactacatcgctgccgaggaagaggattgggattacgccccactcgtgctggcccccgacgaccggtcctacaagtcccagtacctgaacaacgggcctcagcgcatcggtcggaagtacaagaaggtccgcttcatggcctacacggacgaaaccttcaagacaagagaagcaattcagcacgaatccggtattctgggacctctgctgtacggggaggtcggagacacccttctcattatctttaagaaccaggcatcgcggccttataacatctatcctcacggaatcaccgatgtcagacctctctactcccggaggctccctaagggtgtcaagcacctgaaagatttccccatcctgcccggagagatcttcaagtacaagtggaccgtcaccgtcgaggacggccccactaagtcagacccgagatgtttgacacggtactacagctcgttcgtgaacatggagcgggatctggccagcggactgattggtccactcctgatctgctacaaggaatccgtggatcagaggggcaatcagatcatgtccgacaagcggaacgtgatattgttctcggtattcgacgaaaaccggtcgtggtacctcaccgagaacatccagcgctttctgcctaaccccgccggcgtgcagctcgaggacccggaattccaggcctctaacattatgcatagcatcaatggttacgtgttcgattccctgcaactgtccgtgtgcctccacgaagtggcttattggtacatcctctcgattggcgcccagactgatttcctgagcgtgttcttctccggctatactttcaagcataagatggtgtacgaggacaccctgaccctgttcccgttttcgggagagactgtgttcatgtccatggagaacccgggactgtggattctcggttgccacaactccgacttccgcaaccgcggcatgaccgcgctgctcaaagtgtcgtcctgcgacaagaacaccggcgattattacgaggactcgtacgaagatattagcgcctaccttctgtcgaagaacaatgccatcgagccaagatcgtttagccagaacagccgccacccctccacccgacaaaagcaattcaacgccaccacgatcccggaaaacacaacgctgcagtccgaccaggaagagattgattacgatgatactatctccgtcgagatgaagaaagaggacttcgacatctacgacgaggacgaaaaccagagcccccgctccttccaaaagaaaactcgccactattttatcgccgccgtggagaggctgtgggattacggaatgtcatccagcccgcatgtgctgcggaacagggcccagagcggatccgtgccacaattcaagaaagtggtgttccaagaattcaccgatgggtcattcacccaaccgctgtaccgcggagagttgaacgaacacttgggccttttgggaccttacattcgggccgaggtcgaggataacatcatggtgacctttaggaaccaagcttcccgcccctactcattctactcatctctgatctcctacgaagaggatcagcggcagggcgccgaaccgagaaagaacttcgtcaagcctaacgaaactaagacttacttctggaaagtgcagcaccacatggcccctaccaaggacgagttcgactgcaaggcctgggcgtacttctccgacgtggacttggaaaaggacgtgcattcggggctgatcggcccgctgttagtgtgtcacaccaacactctgaaccccgcccacggacgccaggtcaccgtgcaagaattcgcgctgttcttcaccattttcgacgaaaccaagtcgtggtacttcactgaaaacatggaacgcaactgcagagccccatgcaacattcagatggaggacccgacctttaaggagaattaccggttccatgccatcaacggatacatcatggacactctccccggtctggtcatggcccaggatcagagaatccggtggtacctcctgagcatgggctccaacgagaatatccacagcatacacttctccggacacgtgttcactgtgcggaagaaggaagagtacaagatggccctgtacaacctgtacccaggggtgtttgaaaccgtggaaatgttgccgtccaaggctggaatttggcgcgtggaatgcctgattggggagcatctgcacgcgggaatgtccaccctgttcctcgtctactccaacaagtgccaaactccgctgggaatggcctcgggacacatcagagacttccagatcaccgcctccgggcagtacggccagtgggccccgaagctcgcccgcctgcattactccggttccatcaacgcctggtcgaccaaggagccattctcctggattaaggtcgatctgctggcaccgatgatcatccacggcatcaagacccagggcgctagacaaaagttcagctccctgtacattagccagttcatcatcatgtactcactggacgggaagaagtggcagacctaccgcggcaattccaccggaactctgatggtgttctttggcaacgtcgacagctcgggaatcaagcacaacattttcaaccctccgatcatcgcccgctacattagactccaccctacccactattcaatccggtccaccctccggatggagctcatgggctgcgacctcaacagttgttccatgccgctggggatggaatccaaggccatctccgatgctcaaattacggctagctcctatttcaccaacatgttcgcgacctggtcgccgtctaaagccagactgcatctacaaggccggtccaatgcgtggcgcccccaagtcaacaacccgaaggagtggctccaggtcgactttcaaaagactatgaaagtcaccggagtgactactcagggagtgaagtcacttctcacttctatgtacgtgaaggaattcctgatctcgtcgtcccaagacggtcatcagtggactctcttcttccaaaacggcaaagtcaaggtgttccagggcaaccaggactccttcacccccgtcgtgaactcccttgatccccctctgctgactcgctacctgaggatccaccctcagtcctgggtgcaccagatcgcactcaggatggaagtgttgggctgcgaggcccaggacctgtactaa

SEQ ID NO: 82 - DNA, 4392 bp, Artificial Sequence
  Description of Artificial Sequence: Synthetic polynucleotide
atgcaaattgaactgtccacctgtttcttcctgtgcttgctcagattctgcttcagtgccaccagaagatactacctgggggctgttgagctgtcatgggactacatgcagagtgacctgggagagctccctgtggatgccaggttcccaccaagagtccccaagtccttccccttcaacacctcagtggtgtacaaaaagaccctctttgtggagttcactgaccacctgttcaacattgccaagcccagacccccctggatgggcctcttgggccctaccatccaagctgaagtgtatgacactgtggtgatcaccctgaagaacatggcctcccaccctgtgtccctgcatgctgtgggagtcagctactggaaggcctcagagggggcagaatatgatgaccagaccagccagagagaaaaggaagatgacaaggtgttccctgggggatcccacacctatgtgtggcaagtgctcaaggaaaatggtcccatggcctcagaccctctgtgtctgacctactcctacctctcccatgtggacctggtcaaggacctgaactcaggcttaattggagccctgcttgtgtgcagggagggttcccttgctaaggaaaagacccagaccctgcacaagttcatcctgctgtttgctgtctttgatgagggaaagtcctggcactcagaaactaagaacagcctgatgcaggacagggatgctgcctcagccagagcctggcccaagatgcacactgtgaatggttatgtgaacagaagcttgcctggcctcattggatgccacagaaaatcagtctactggcatgtcattggcatgggaaccacccctgaggtccacagcatcttcctggagggccataccttccttgtgagaaaccatagacaggcctcccttgaaatctcccccatcaccttcctcactgcccaaaccctcctcatggacttgggccagttcctcttgttctgccacatctccagccatcagcatgatggaatggaagcctatgtgaaggtggactcctgccctgaggagccccagctgagaatgaaaaacaatgaggaggcagaggattatgatgatgacctgactgactcagagatggatgtggtcaggtttgatgatgacaactccccttccttcattcaaattaggagtgtggccaagaaacaccccaaaacctgggtccactacattgcagcagaggaagaggactgggactatgcaccactggtgctggcccctgatgacaggtcctacaagtcccagtacctgaacaatggcccccagaggattggaagaaagtacaagaaagtcaggttcatggcctacactgatgaaaccttcaagaccagagaagccatccagcatgagtcaggcatcctgggaccacttctctatggggaagtgggggacaccctgctgatcatcttcaaaaaccaggcctccagaccctacaacatctacccccatggcatcactgatgtcaggcccctctactcaagaaggctgcccaagggagtcaagcaccttaaggacttccccattctgcctggagagatcttcaagtacaagtggactgtgactgtggaagatgggccaaccaagtcagaccccagatgcctgaccagatactacagcagctttgtcaacatggagagggacctggcctcaggactcattggtccactcctgatctgctacaaggaatcagtggaccagaggggaaaccagatcatgtcagacaagaggaatgtgatcctgttctctgtgtttgatgagaacaggtcctggtacctgacagaaaacatccagaggttcctgcctaacccagctggagtgcagctggaggacccagagttccaagcctccaacatcatgcacagcatcaatggatatgtgtttgacagccttcaactgtcagtgtgcctccatgaagtggcctactggtacatactgtccattggagcccagactgacttcctgtctgtgttcttctctggatacaccttcaagcacaagatggtgtatgaggacacactgaccctgttccctttctctggggaaactgtgttcatgagcatggagaaccctggcctgtggatcctgggctgccacaactcagacttcagaaacagagggatgactgccctgctgaaggtgtcctcctgtgacaagaacactggagactactatgaggactcctatgaggacatctcagcatacctcttgagcaagaacaatgccattgaacccaggagcttctcccaaaactccagacacccaagcaccagacaaaagcaattcaatgctaccaccattcctgaaaacacaaccctgcagtcagaccaggaggaaattgactatgatgacactatttctgtggaaatgaagaaggaggactttgacatctatgatgaagatgaaaaccagtcccctaggagcttccagaagaaaaccaggcactactttatagcagcagtggagagactgtgggactatggaatgtcctcctcccctcatgtgctgagaaacagagcccagtcaggatcagtgccccagttcaagaaggtggtgttccaggaattcactgatggatccttcacccaacccctgtacagaggggaattgaatgagcacctgggcctgctgggaccctacattagggctgaagtggaggacaacatcatggtcaccttcagaaaccaggcatccagaccttacagcttctacagctccctgatctcctatgaagaggaccagagacagggagctgagcccagaaagaactttgtcaagcccaatgagactaagacctacttctggaaagtgcagcaccacatggcccccaccaaggatgaatttgactgcaaggcctgggcctacttctctgatgtggatctggaaaaggatgtgcactctggtctgattggcccccttctggtctgccacaccaacactctgaaccctgcccatggtagacaggtcactgtgcaagagtttgccctcttcttcaccatctttgatgaaaccaagtcctggtacttcactgaaaacatggaaagaaactgcagggccccctgcaacatccaaatggaggaccccaccttcaaggagaactacaggttccatgccatcaatggctacatcatggataccctgcctggactggtcatggcccaggaccagaggatcagatggtacctcctgagcatgggcagcaatgagaacattcactccatccactttagtgggcatgtgttcactgtcaggaagaaggaagagtacaagatggccctgtacaacctgtaccctggagtgtttgagactgtggagatgctgcccagcaaagctggaatctggagggtggaatgcctgattggtgaacacctccatgctggaatgtccaccctcttcctggtgtactccaacaagtgccagactcctttggggatggcctcagggcacattagggacttccagatcactgcatcaggacagtatggccaatgggccccaaagctggccagactgcactactctggttccatcaatgcctggtccaccaaggaaccattctcctggatcaaggtggacctcctggcccccatgattattcatggaatcaagacccagggagccaggcagaagttctccagcctctacatcagccagttcatcatcatgtactcccttgatggaaagaagtggcagacctacagaggaaactccactggcaccctgatggtgttctttggcaatgtggactcctctggtatcaagcacaacatcttcaaccctccaatcattgccagatacatcagactgcacccaacccactactccattaggtccaccctgaggatggaactcatgggctgtgacctcaactcctgctccatgcctctgggcatggaatccaaggccatctcagatgcacaaattactgcctcctcctacttcaccaacatgtttgccacatggagcccttccaaggccaggctgcacctccaaggcagaagcaatgcctggaggccccaggtcaacaaccccaaggaatggctccaggtagacttccaaaagaccatgaaggtcactggagtcaccacccagggagtgaagtccctgctgacctctatgtatgtgaaggaattcctaatcagcagctcccaggatggtcaccagtggacccttttcttccaaaatgggaaagtgaaggtgttccaaggcaaccaggacagcttcacccctgtggtcaacagccttgaccctcccctgttgactagatacctcagaatccacccccagtcctgggtgcaccagattgccctgagaatggaagtgctgggctgtgaagcccaggacttgtactaa

SEQ ID NO: 83 - DNA, 4392 bp, Artificial Sequence
  Description of Artificial Sequence: Synthetic polynucleotide
atgcagattgaactctccacctgtttcttcctgtgcctgctgagattctgcttcagtgccaccaggaggtactacttgggtgcagtggagctctcctgggactacatgcagtcagacctgggagagctccctgtggatgccaggttccctccaagggtccctaaatccttccccttcaacacctcagtggtgtacaagaaaaccctgtttgtggaattcactgaccacctgttcaacattgccaagcccaggccaccctggatggggctcctgggcccaaccatccaagctgaagtgtatgacactgtggtcatcaccctcaagaacatggcctcccaccctgtctccctgcatgctgtgggagtgtcctactggaaggcctcagagggggctgagtatgatgaccagacctcccagagggaaaaggaagatgacaaggtgttcccaggaggatcccacacctatgtgtggcaagtcctgaaggaaaatggtcccatggcatcagaccccttgtgcttgacctactcctacctgagccatgtggacctggtcaaggacctgaactcaggccttattggagccctgcttgtatgcagagagggcagcctggccaaggaaaagacccagaccctgcacaagttcatcctcctgtttgctgtgtttgatgaaggaaagtcctggcactcagagactaagaacagcctgatgcaggacagggatgcagcatcagccagagcctggcccaagatgcacactgtgaatggatatgtgaacaggtccctccctggactaattggatgccacagaaagtctgtgtactggcatgtcattggaatgggcacaacccctgaagtgcatagcatcttcctggaaggacacaccttcctggtcaggaaccacagacaggcatccctggagatctccccaatcaccttcctgactgcccagactctcctgatggacctgggacagttcttgcttttctgccacatctcctcccaccaacatgatggcatggaagcctatgtgaaggtggactcctgccctgaggaacctcaactgaggatgaaaaacaatgaagaagctgaagattatgatgatgacctgactgactcagagatggatgttgtcagatttgatgatgacaacagccctagcttcatccagattagatctgtggccaagaagcaccccaagacctgggtgcactacattgctgctgaggaagaggactgggactatgcccccctggtgctggcccctgatgacagatcctacaagtcccagtacctgaacaatggtccccagagaattgggagaaagtacaagaaagtcagattcatggcctacactgatgaaaccttcaagactagagaagccatccagcatgagtcaggcattctgggtcccctgctgtatggggaagttggtgacaccctgctgatcatcttcaagaaccaagccagcaggccttacaacatctacccccatggaattacagatgtcaggccactgtactccaggagactgcctaagggagtcaagcacctcaaggacttccccatcctgcctggagaaatcttcaagtacaagtggactgtgactgtggaggatgggcctaccaagtcagaccctagatgcctgactaggtactactccagctttgtcaacatggagagagacttggcctcaggactcattggtccactgcttatttgctacaaggagtcagtggaccagagaggaaaccaaatcatgtctgacaagagaaatgtcatcctgttctcagtctttgatgagaacaggtcctggtacctgactgaaaacatccagagattcctgcccaaccctgctggggtgcaactggaggaccctgagttccaggcctcaaacataatgcacagcatcaatggctatgtctttgactccctgcaactgtcagtgtgcttgcatgaagtggcctactggtacatcctctccattggggcccagactgacttcctgtcagtgtttttctctggctacaccttcaagcataaaatggtgtatgaggacaccctcaccctgttccccttctctggagagactgtgttcatgagcatggaaaacccaggcctctggatccttggctgtcacaactcagacttcagaaacaggggcatgactgccctgcttaaggtgtccagctgtgacaagaacactggggactactatgaggactcctatgaggacatcagtgcctaccttctgtccaagaacaatgccattgaacctaggagcttcagccagaactccaggcacccaagcaccaggcagaagcagttcaatgccaccaccatccctgagaacactaccctgcaatcagaccaagaagaaattgactatgatgacaccatctcagtggagatgaagaaggaggactttgacatctatgatgaagatgaaaaccaaagccccagatccttccagaaaaagaccaggcactacttcattgcagcagtggagagattatgggactatgggatgtccagctcccctcatgtgctgagaaacagagcacagtctggctcagtgccccagttcaagaaggtggtgttccaggagttcactgatggttccttcacccaaccattgtacaggggagagctgaatgagcacctgggcctgttgggcccatacatcagagcagaagtggaggacaacatcatggtcaccttcagaaaccaggcctccagaccctactccttctactcctccctgatctcctatgaagaggaccaaagacagggagctgagcccagaaagaactttgtgaagccaaatgaaaccaagacctacttctggaaagtgcagcaccacatggcccccaccaaggatgagtttgactgcaaagcttgggcctacttcagtgatgtggacttggagaaggatgtgcactcaggtcttattggccctctgcttgtgtgccataccaacactcttaaccctgcacatggcagacaagtcactgtgcaggagtttgccctcttcttcaccatctttgatgaaacaaagtcctggtacttcacagaaaacatggaaaggaactgcagagccccttgcaacatccagatggaggaccccaccttcaaggaaaactacaggtttcatgccatcaatgggtacatcatggacaccctgcctggactggtcatggcccaggaccagaggatcagatggtatctgctcagcatgggaagcaatgagaacatccactccattcacttcagtggtcatgtgttcactgtcaggaaaaaggaggagtacaagatggccctctacaacctttaccctggagtgtttgaaactgtggaaatgctgccatccaaggctggcatctggagggtggaatgcctcattggtgaacacctccatgctggaatgtccaccctcttcctggtgtacagcaacaagtgccagacccccctgggaatggcttcagggcacatcagagacttccagatcactgcctctgggcagtatggacagtgggcccctaagctggccaggctccactactctggaagcatcaatgcctggtccactaaggagcccttctcctggatcaaagtggatctgctggcccccatgatcatccatggcattaagacccagggggccagacagaagttctcctccctctacataagccagttcattatcatgtacagcctggatgggaagaagtggcagacctacaggggcaactccactggaaccctgatggtgttctttgggaatgtggacagctcaggcatcaagcacaacatcttcaaccccccaatcattgccagatacatcaggctccaccccacccactacagcatcagatccaccctgagaatggaacttatgggctgtgacctcaactcctgtagcatgcccctgggcatggagtccaaggccatttcagatgcccaaatcactgcatcctcctacttcaccaacatgtttgccacttggagcccttccaaggccagactgcatctgcaaggcagatccaatgcctggaggccccaggtcaacaaccctaaggaatggctccaggtggacttccaaaagactatgaaagtcactggagtgaccacccagggagtgaagtccctgctgacctctatgtatgtgaaggaattcctcatctcctcaagccaagatggacaccagtggaccctgttcttccaaaatggaaaggtcaaagtgttccagggcaaccaggacagcttcacccctgtggtgaactccttggacccccccctgttgaccagatacctgaggatccacccccagtcctgggtccaccagattgccttgagaatggaggtgctgggctgtgaagcccaggacctctactaa

SEQ ID NO: 84 - DNA, 4392 bp, Artificial Sequence
  Description of Artificial Sequence: Synthetic polynucleotide
atgcagattgaactatccacttgcttcttcctgtgtcttttgagattctgcttcagtgccaccaggagatactacctgggagctgtggagctcagctgggactacatgcagtcagacctgggagaactccctgtggatgccagattcccacctagggtgcccaagtccttccccttcaacacctcagtggtgtacaaaaagaccctgtttgtggaattcactgaccatctgttcaacattgccaaacccagaccaccctggatgggactgctgggtcccaccattcaagcagaagtctatgacactgtggtcatcactctcaagaacatggcttcccaccctgtgtccctgcatgctgtgggagtctcctactggaaggcctcagaaggggctgagtatgatgaccagacttcccaaagagaaaaggaggatgacaaggtctttcctggtggaagccacacctatgtttggcaagtcctgaaggaaaatgggcccatggcttcagaccccctgtgccttacctactcctacctgtcccatgtggatcttgtgaaggatctgaactcagggttgattggggcccttcttgtgtgtagggaaggcagccttgccaaggaaaagacccaaaccctccacaaattcattttgctgtttgcagtgtttgatgaaggaaagtcatggcactcagaaaccaagaacagcctcatgcaggacagagatgctgcctcagccagagcctggcccaagatgcacactgtgaatggatatgtgaacaggtccctgcctggattgattggctgccacaggaaatcagtgtactggcatgtcattggcatggggaccaccccagaggtccactccatcttcctggagggacacacctttctggtcagaaaccacagacaagccagcctggagatttcccccatcaccttcctgactgcccagacccttctgatggaccttgggcagttcctgttgtcctgtcacattagctcccatcagcatgatggaatggaagcctatgtgaaggttgactcctgccctgaggaaccccaactcaggatgaagaacaatgaggaagcagaggactatgatgatgacctgactgactcagagatggatgttgtcagatttgatgatgacaacagcccctccttcatccaaatcagatctgtggcaaagaaacatcccaaaacctgggtccactacattgctgcagaagaagaggactgggactatgccccactggtgctggccccagatgacaggtcctacaagtcccagtacctgaacaatggacctcagaggattggtagaaagtacaagaaagtcagattcatggcctacactgatgagactttcaagaccagggaagccattcagcatgaatcaggcattctgggccccctgctgtatggagaagtgggagacactctgctgatcatcttcaagaaccaggcatccaggccctacaacatctacccacatgggatcactgatgtcaggcccctctactcaagaaggctccccaagggtgtcaagcacctgaaggactttcccatcctccctggggagatcttcaagtacaagtggactgtgactgtggaggatggcccaactaagtctgacccaagatgcttgaccagatactacagcagttttgtgaacatggagagagatctggcctctggcctgattggtcccctcctcatctgctacaaggaatcagtggaccagagagggaaccagattatgtcagacaagaggaatgtgatcttgttcagtgtatttgatgagaacaggtcctggtacctgactgagaacatccagaggttcctgcctaacccagctggtgtccagcttgaggatccagaattccaagcctcaaacatcatgcactccatcaatggttatgtgtttgacagcctccaactgtcagtgtgcctgcatgaagtggcatactggtacatcctgtccattggagcccaaactgacttcctgtctgtgttcttctctggatacactttcaagcataagatggtgtatgaggacaccctcaccctgttccccttctctggggagactgtctttatgtccatggaaaacccaggactgtggatcctgggctgtcacaactcagacttcagaaacaggggcatgactgccctgctcaaagtgtcctcctgtgacaagaacactggggactactatgaagattcctatgaggacatctcagcttatctgctgtccaagaacaatgccattgagcctaggagcttcagccagaacagcaggcacccctcaactagacagaagcagttcaatgctaccacaatcccagaaaacactacactgcagagtgaccaggaagaaattgattatgatgacactatctcagtggagatgaaaaaggaagattttgacatctatgatgaggatgagaaccaaagccctagaagctttcagaagaaaaccagacactacttcatagcagctgtggagaggctgtgggattatggcatgagctcctccccacatgtgctgagaaacagggcccagtcaggctcagtgccccaattcaagaaggtggtgttccaggagttcactgatggttccttcactcaacctctgtacaggggggagctcaatgagcaccttgggctgctgggaccttacatcagagcagaagtggaggacaacatcatggtcaccttcagaaaccaggcctcaaggccctactccttctactcctccctgatctcctatgaagaagatcagagacagggggctgaacccaggaaaaactttgtgaagcccaatgagactaagacctacttttggaaggtccagcaccacatggctcccaccaaggatgagtttgactgcaaggcctgggcatacttctcagatgtggaccttgaaaaggatgtgcactctggactcattggccccctcctggtctgccacaccaacaccctgaacccagcccatggcagacaagtcactgtgcaggagtttgccctttttttcaccatctttgatgaaaccaagtcctggtacttcactgaaaatatggagagaaactgcagagccccatgcaacatccaaatggaggaccctaccttcaaggagaactacaggttccatgccatcaatggctacatcatggacacactccctggacttgtgatggcccaggaccagagaatcagatggtacctcttgtccatgggcagcaatgagaacattcactccatccacttctctggtcatgtgttcactgttagaaagaaggaagagtacaagatggccctgtacaacctctaccctggagtgtttgaaactgtggaaatgctgcctagcaaggctgggatctggagagtggagtgcctcattggggaacatctgcatgcaggaatgtccacccttttcctggtgtactccaacaagtgccagacccctttgggaatggcatcaggccacatcagagacttccagattacagcctcaggacaatatggacagtgggcccctaagctggccaggctccactactctgggtccatcaatgcctggtccaccaaggaaccttttagctggatcaaagtggacttgctggcccccatgatcatccatggaatcaagactcagggagcaaggcagaagttctcctccctctacattagccaattcattatcatgtacagcctggatggaaagaagtggcagacctacagaggaaactccactggcaccctgatggtgttctttggaaatgtggactcctcaggaatcaagcacaacatcttcaaccctccaattattgccagatacattagactccaccccactcactactccattagaagcaccctcaggatggaactgatgggatgtgacctcaactcctgctccatgcctctgggcatggaaagcaaagccatctcagatgcccagatcactgcatccagctacttcaccaacatgtttgccacctggagcccttccaaagccagactgcatctgcaaggcagatccaatgcatggaggcctcaggtcaacaacccaaaggagtggctccaagtggacttccaaaagaccatgaaggtcacaggagtgaccacccagggagtgaagtccctgttgaccagcatgtatgtgaaggagttcctgatctcatcctcccaagatggccatcagtggactctgttcttccaaaatggcaaagtgaaggtctttcaggggaaccaggattccttcacccctgtggtcaatagcctggatccccctctattaactagatacctgaggatccacccccaaagctgggtgcaccagattgctctgaggatggaagtgttgggctgtgaggcccaagacctgtactaa

SEQ ID NO: 85 - DNA, 4392 bp, Artificial Sequence
  Description of Artificial Sequence: Synthetic polynucleotide
atgcagattgaactctccacctgtttcttcctgtgcctgctgagattctgcttcagtgccaccaggagatactacctgggagctgtggaactgtcctgggactacatgcagtctgacttgggagagctcccagtggatgccaggttcccacctagagtgcccaagtccttccctttcaacacctcagtggtgtacaaaaagactctgtttgtggagttcactgaccacttgttcaacattgccaagccaagacccccctggatggggctactgggccccaccatccaagcagaagtctatgacactgtggtgatcaccctgaaaaacatggcctcccaccctgtgtccctgcatgctgtgggggtgtcctactggaaggcctctgaaggagcagaatatgatgaccagacctcccagagggaaaaggaggatgataaggtgttccctgggggctcccacacttatgtgtggcaagtccttaaggaaaatgggccaatggcctcagaccccctttgcttgacttactcctacctgagccatgtagatcttgtgaaggacctgaactcaggtcttattggagccttgttggtgtgcagggaaggttcactggccaaagaaaagacccagaccctgcacaagttcatcctcctgtttgctgtctttgatgagggaaagtcctggcactcagaaactaagaacagcctgatgcaggacagggatgctgcctctgctagagcctggcctaagatgcatacagtcaatggttatgtcaataggtccctgcctggattgattggatgccacaggaagtcagtgtactggcatgtcattggcatgggaaccactcctgaagtgcactccatcttcctggaagggcacacatttctagttaggaaccacagacaggcctccctggagatcagcccaatcaccttcctgactgcccagaccctcctcatggacctgggacagttcctgctgtcctgccacatctcctcacaccagcatgatggaatggaggcctatgtgaaagtggacagctgccctgaggaaccccagctgagaatgaagaacaatgaagaggctgaggattatgatgatgacctcactgactcagagatggatgtggtcagatttgatgatgacaacagccccagctttattcaaatcagatcagtggccaagaagcatcctaagacctgggtgcattacattgctgctgaagaggaagattgggactatgcccccctggtgctggcacctgatgataggtcctacaagagccagtacctgaacaatggaccccagaggattggcaggaagtacaagaaggtcagattcatggcctacactgatgaaaccttcaagaccagagaggccatccagcatgagtcaggaattctgggacccctcctctatggggaagtgggagacaccctgctcatcatcttcaagaaccaggcctccagaccatacaacatctacccccatggaattactgatgtcagaccactgtactccagaagattgccaaagggagtgaagcacctgaaagacttcccaatcttgcctggggaaattttcaagtacaagtggactgtgactgtggaagatgggccaactaagtcagatcccagatgcctcactagatactactcatcctttgtgaacatggagagggacctggcttcaggactgattggcccactgctgatttgttacaaggagtcagtggatcagagaggaaaccagattatgtcagacaagaggaatgtcatcctgttcagtgtgtttgatgagaacaggagttggtacttgactgagaacattcagagattcctgccaaacccagcaggggtgcagttggaggaccctgagttccaggcttccaacatcatgcactctatcaatggctatgtgtttgactccctgcaactctctgtgtgcctgcatgaagtggcctactggtacattctctccattggtgcccagactgatttcctgtcagtgttcttctctggatacactttcaagcacaagatggtgtatgaggacaccctgaccctcttccccttctctggggaaactgtctttatgtccatggaaaaccctggactttggatcctggggtgtcacaacagtgatttcaggaacaggggaatgactgccctgctgaaagtgtcctcctgtgacaagaacactggggactactatgaagattcctatgaagatatctcagcctacctcctctccaaaaacaatgccattgagcctagatccttcagccaaaactccaggcaccccagcaccagacaaaagcaattcaatgcaaccaccatccctgagaacactaccctgcaatcagaccaagaagagattgactatgatgacaccatctcagtggagatgaagaaggaagattttgacatctatgatgaggatgagaaccagagcccaaggtccttccagaaaaagaccaggcactacttcattgcagctgtggaaagactgtgggactatggaatgtcctcctccccacatgtgctgaggaacagagcccagtcaggatcagtgccacagttcaagaaagtggtgttccaagaattcactgatggcagcttcactcagcccctgtacagaggagagctcaatgagcaccttggcctgctgggcccctacattagagctgaagtggaagataacatcatggtcactttcaggaaccaagccagcaggccttactcattctactcctcactgatcagctatgaagaggaccagagacagggagcagagcccagaaagaactttgtgaagccaaatgaaaccaagacctacttctggaaggtccagcaccatatggccccaaccaaggatgagtttgactgcaaggcctgggcctacttcagtgatgtggacctggaaaaggatgtgcactcagggctcattggacctcttctggtctgccataccaacaccctcaaccctgcccatggtagacaagtcactgtgcaagaatttgccctgttcttcaccatttttgatgaaactaaaagctggtacttcacagagaacatggaaagaaactgcagggccccctgcaacatccaaatggaggaccccactttcaaggaaaactacagattccatgccattaatggatacatcatggacaccctgcctggcttagtgatggcccaggaccaaaggatcagatggtacctgttgtccatgggttccaatgagaacatccactccatacatttctcaggacatgtgttcactgtcagaaagaaagaggagtacaagatggccctttacaacctttaccctggggtctttgaaactgtggagatgctgccatccaaggctggcatctggagagtggaatgcctgattggagaacacctccatgctggaatgtccaccctcttcctggtgtactcaaacaagtgccagacccctctgggcatggcctcaggacacattagggacttccagatcactgcctctggccagtatggtcaatgggcccccaagcttgccagactgcattactctgggtccatcaatgcctggagcaccaaggaacctttctcctggatcaaagtggacctcctggcccccatgattatccatggcatcaagacccagggagccaggcagaagttctcctccctgtacattagccaattcatcattatgtacagcctggatggaaagaagtggcagacctacagaggaaacagcactggcaccctgatggtcttttttggcaatgtggacagctctgggatcaagcataacatcttcaaccctcccataattgcaagatacatcaggctgcaccccacccactacagcatcaggtccaccctgagaatggagctcatgggctgtgacctgaacagctgctccatgcctctgggaatggaatccaaagccatctcagatgcccaaatcacagcctcctcctacttcaccaacatgtttgctacctggagcccttccaaagccaggctgcacttacaaggaagaagcaatgcatggaggcctcaggtcaacaaccccaaggagtggctgcaagtggacttccaaaagaccatgaaagtcactggagtgaccactcaaggagtgaagtccctgttgaccagcatgtatgtcaaggaatttctgatctcaagctcccaagatggccatcagtggactctgttcttccaaaatggaaaggtcaaggtgttccagggcaaccaggacagctttacccctgttgtgaactccctggacccccccctgctgactagatacttgagaatccacccccagtcctgggtgcaccagattgcattgagaatggaagtccttggctgtgaagcccaggacctgtactaa

SEQ ID NO: 86 - DNA, 4392 bp, Artificial Sequence
  Description of Artificial Sequence: Synthetic polynucleotide
atgcagattgagctctccacctgtttcttcctttgcctcctgagattctgttttagtgccaccagaagatactacctgggtgctgtggaactctcctgggactacatgcagtcagacctgggtgaactgcctgtggatgccagattccccccaagagtgcccaagtccttccccttcaacacctcagtggtctacaagaaaaccctctttgtggagttcactgaccacctcttcaacattgccaagcctaggcccccatggatgggcctgctgggacccaccatccaagctgaagtgtatgacactgtggtcatcaccctcaagaacatggcctcccaccctgtctccctgcatgctgtgggtgtctcctactggaaggcctcagagggagcagaatatgatgaccaaacctcccagagagaaaaggaagatgacaaggtctttccaggaggctcccatacctatgtgtggcaagtgcttaaggagaatggcccaatggcctcagaccccctctgcctgacctactcctacctctcccatgtggacctggtcaaggacctgaactcaggtcttattggagccctgcttgtgtgcagagagggcagcctggccaaggaaaagacccaaaccctgcacaagttcatcctgctgtttgcagtgtttgatgagggaaagtcctggcactcagaaaccaagaacagcctgatgcaggatagagatgctgcctcagccagggcctggcccaagatgcacactgtgaatggctatgtgaacagaagcctgccaggcttgattggatgtcacaggaagtctgtgtactggcatgtcattggcatgggcaccacccctgaggtgcactccatcttcttggaaggccataccttcttggtcagaaaccataggcaggcctccctggaaatctcccctatcaccttcttgactgcccaaactctcctgatggacctgggccagttcttgctgagctgccacatcagctcacatcagcatgatgggatggaggcctatgtgaaggtggacagctgcccagaagaacctcagttaaggatgaagaacaatgaggaggcagaggactatgatgatgacctgactgactctgagatggatgttgtcagatttgatgatgacaacagcccaagcttcattcagatcagatcagtggccaagaagcaccccaagacttgggtgcactacatagctgcagaggaagaggattgggactatgctcctcttgtgctggcccctgatgacaggagctacaaatcccagtaccttaacaatggcccccagaggattggaaggaagtacaagaaagtcaggttcatggcatacactgatgagactttcaagactagagaggccatccagcatgagtcagggatcctgggcccactgctgtatggagaagtgggggacaccctcctcatcattttcaagaaccaagctagcagaccctataacatctaccctcatgggatcactgatgtcaggcccctgtactcaagaaggctgcctaagggagtgaaacacctgaaggacttccccatcctccctggagagatcttcaagtacaagtggactgtgactgtggaagatggaccaaccaagtcagaccccagatgtctgaccagatactacagctcctttgtcaacatggaaagggacctggcctcagggcttattggaccactgctcatctgttacaaggaatcagtggaccagaggggaaaccagattatgtcagacaagagaaatgtgatcctgttctcagtctttgatgagaacagatcctggtacctgactgaaaacattcaaagattcctgcccaaccctgctggagtgcagctggaggacccagagttccaggcctccaacatcatgcactccattaatggttatgtctttgactccctgcaactgtcagtctgcctgcatgaagtggcctactggtacatcctgagcattggagcccagactgacttcctgtcagtattcttttctggctacaccttcaagcataagatggtgtatgaagataccctcactctgttccccttttctggggaaactgtgttcatgagcatggaaaaccctggactgtggatcctgggttgccacaactcagacttcaggaacagagggatgactgccctgttgaaggtgtcctcctgtgacaagaacactggggactactatgaagatagctatgaggacatctcagcctaccttttgtccaagaacaatgccattgagcccagaagcttcagtcagaacagcagacatcccagcaccaggcagaagcagttcaatgccaccaccattcctgaaaacaccaccctgcaatctgaccaggaggaaattgattatgatgacacaatctctgtggagatgaagaaagaggactttgacatctatgatgaagatgagaaccaatccccaagatccttccagaaaaagaccaggcactacttcattgctgctgtggaaagactctgggactatggaatgagctcctccccccatgtgttgagaaacagagcccagtcaggctcagtgcctcagtttaagaaagtggtgttccaggaattcactgatggatccttcacccaacccctgtacagaggagaacttaatgagcacctgggactgctgggcccctacatcagggctgaagtggaggacaacatcatggtcacattcagaaaccaggcttccagaccttacagcttctactcctccctcatctcctatgaggaggatcagagacagggggctgaacccaggaaaaactttgtcaagcccaatgagactaagacctacttctggaaggtccagcaccacatggcccccactaaggatgaatttgactgcaaggcctgggcatacttctcagatgtggatctggaaaaagatgtgcactcaggactgattggacctctgctggtctgccacaccaacactctgaaccctgcccatggcagacaagtcactgtgcaggagtttgctctctttttcaccatttttgatgaaaccaagtcctggtacttcactgagaacatggagaggaactgcagggccccctgcaacattcagatggaggaccccaccttcaaggagaactacagattccatgccatcaatggttacatcatggacaccctgcctggacttgtcatggcccaagaccagagaattaggtggtacctcctctcaatgggatccaatgagaacatccactccatccacttcagtggacatgtgttcacagtcagaaagaaggaagagtacaagatggccctgtacaacctgtaccctggggtgtttgaaactgtggaaatgctgcccagcaaggctggaatctggagggtggaatgcctgattggggaacacctccatgctggaatgtccaccctttttctggtctactccaacaagtgccagacccctctggggatggcatcaggccacatcagagacttccaaatcacagcctctggacagtatggccaatgggcccctaagctggccaggttgcactactcaggctccatcaatgcctggtccactaaggagcctttctcctggattaaggtggaccttctggcccctatgatcatccatggtatcaagacccagggtgccagacaaaagttctccagcctgtacataagccagttcatcattatgtactccttggatggaaagaagtggcaaacctacaggggcaactccactggtactctcatggtgttctttggaaatgtggactcctctggtatcaagcacaacatcttcaaccctcccatcattgccagatacattagactgcaccccacacactacagcatcagaagcaccctcaggatggaactgatgggctgtgacttgaacagctgcagcatgccattgggaatggaatccaaggctatttcagatgctcagatcactgcctcctcctacttcactaacatgtttgccacctggtccccatcaaaagccaggctgcatctgcagggcagaagcaatgcctggaggccccaagtgaacaacccaaaggaatggcttcaggttgatttccaaaagaccatgaaagtcactggagtgaccacccagggagtgaagtccctgctgacctccatgtatgtgaaagaattcctgatctcatcctcccaagatgggcaccagtggaccctcttcttccaaaatggaaaggtcaaggtgttccaaggaaaccaggactccttcacccctgtggtcaactccctggacccaccactgctgactaggtacctcagaatccatcctcaatcctgggtgcaccagattgccctcagaatggaagtgctgggctgtgaagcacaggacctgtactga

SEQ ID NO: 87 - DNA, 4392 bp, Artificial Sequence
  Description of Artificial Sequence: Synthetic polynucleotide
atgcagattgaactgtcgacatgcttcttcttgtgtcttttgagattctgtttttccgctactcggagatactacttgggagccgtggaactgtcctgggactacatgcaatccgacttgggagagctgcctgtggacgcgcgcttcccgccgcgcgtgccgaagtccttcccattcaacaccagcgtggtgtacaaaaagacgctgttcgtggagtttaccgaccatctgttcaatatcgcaaagcctcgccccccctggatgggtttgctcgggcccaccatccaagccgaagtgtatgacaccgtggtcatcacactgaagaacatggccagccacccagtgtcgctgcacgcagtgggcgtgtcctactggaaagcctccgaaggggcggagtacgacgaccagacttcgcagagagaaaaggaggacgacaaggttttccctgggggatcccacacctacgtgtggcaagtgctgaaggaaaatggacccatggcgtccgatccgctgtgtctgacttactcctacctgagccacgtggaccttgtgaaagacctgaactcaggcctgatcggagccctgctggtctgccgcgagggaagcctggcgaaggaaaagactcaaaccctccacaagttcattctgctgttcgcggtgtttgatgagggaaagagctggcactccgaaaccaagaacagcctgatgcaggaccgagatgctgcctccgcccgggcctggcccaagatgcacactgtgaacggctacgttaaccgctccctgcccggacttatcggatgccaccggaagtcagtgtattggcacgtgatcggcatggggaccaccccggaggtgcactccatcttcctggagggacacaccttccttgtgcggaaccacagacaggcatcactggaaatctccccgattaccttcctgaccgctcagaccctgctgatggacctcggtcaattcctcctctcatgccacatttcaagccatcagcatgacgggatggaagcctacgtgaaggtcgactcctgccctgaggaaccacagctgcggatgaagaacaacgaagaggctgaggactacgatgatgacctgaccgacagcgaaatggatgtcgtgcggttcgatgacgacaacagccccagcttcattcaaatccgctccgtggccaagaagcatccgaaaacttgggtgcactacatcgctgccgaggaagaggattgggattacgccccactcgtgctggcccccgacgaccggtcctacaagtcccagtacctgaacaacgggcctcagcgcatcggtcggaagtacaagaaggtccgcttcatggcctacacggacgaaaccttcaagacaagagaagcaattcagcacgaatccggtattctgggacctctgctgtacggggaggtcggagacacccttctcattatctttaagaaccaggcatcgcggccttataacatctatcctcacggaatcaccgatgtcagacctctctactcccggaggctccctaagggtgtcaagcacctgaaagatttccccatcctgcccggagagatcttcaagtacaagtggaccgtcaccgtcgaggacggccccactaagtcagacccgagatgtttgacacggtactacagctcgttcgtgaacatggagcgggatctggccagcggactgattggtccactcctgatctgctacaaggaatccgtggatcagaggggcaatcagatcatgtccgacaagcggaacgtgatattgttctcggtattcgacgaaaaccggtcgtggtacctcaccgagaacatccagcgctttctgcctaaccccgccggcgtgcagctcgaggacccggaattccaggcctctaacattatgcatagcatcaatggttacgtgttcgattccctgcaactgtccgtgtgcctccacgaagtggcttattggtacatcctctcgattggcgcccagactgatttcctgagcgtgttcttctccggctatactttcaagcataagatggtgtacgaggacaccctgaccctgttcccgttttcgggagagactgtgttcatgtccatggagaacccgggactgtggattctcggttgccacaactccgacttccgcaaccgcggcatgaccgcgctgctcaaagtgtcgtcctgcgacaagaacaccggcgattattacgaggactcgtacgaagatattagcgcctaccttctgtcgaagaacaatgccatcgagccaagatcgtttagccagaacagccgccacccctccacccgacaaaagcaattcaacgccaccacgatcccggaaaacacaacgctgcagtccgaccaggaagagattgattacgatgatactatctccgtcgagatgaagaaagaggacttcgacatctacgacgaggacgaaaaccagagcccccgctccttccaaaagaaaactcgccactattttatcgccgccgtggagaggctgtgggattacggaatgtcatccagcccgcatgtgctgcggaacagggcccagagcggatccgtgccacaattcaagaaagtggtgttccaagaattcaccgatgggtcattcacccaaccgctgtaccgcggagagttgaacgaacacttgggccttttgggaccttacattcgggccgaggtcgaggataacatcatggtgacctttaggaaccaagcttcccgcccctactcattctactcatctctgatctcctacgaagaggatcagcggcagggcgccgaaccgagaaagaacttcgtcaagcctaacgaaactaagacttacttctggaaagtgcagcaccacatggcccctaccaaggacgagttcgactgcaaggcctgggcgtacttctccgacgtggacttggaaaaggacgtgcattcggggctgatcggcccgctgttagtgtgtcacaccaacactctgaaccccgcccacggacgccaggtcaccgtgcaagaattcgcgctgttcttcaccattttcgacgaaaccaagtcgtggtacttcactgaaaacatggaacgcaactgcagagccccatgcaacattcagatggaggacccgacctttaaggagaattaccggttccatgccatcaacggatacatcatggacactctccccggtctggtcatggcccaggatcagagaatccggtggtacctcctgagcatgggctccaacgagaatatccacagcatacacttctccggacacgtgttcactgtgcggaagaaggaagagtacaagatggccctgtacaacctgtacccaggggtgtttgaaaccgtggaaatgttgccgtccaaggctggaatttggcgcgtggaatgcctgattggggagcatctgcacgcgggaatgtccaccctgttcctcgtctactccaacaagtgccaaactccgctgggaatggcctcgggacacatcagagacttccagatcaccgcctccgggcagtacggccagtgggccccgaagctcgcccgcctgcattactccggttccatcaacgcctggtcgaccaaggagccattctcctggattaaggtcgatctgctggcaccgatgatcatccacggcatcaagacccagggcgctagacaaaagttcagctccctgtacattagccagttcatcatcatgtactcactggacgggaagaagtggcagacctaccgcggcaattccaccggaactctgatggtgttctttggcaacgtcgacagctcgggaatcaagcacaacattttcaaccctccgatcatcgcccgctacattagactccaccctacccactattcaatccggtccaccctccggatggagctcatgggctgcgacctcaacagttgttccatgccgctggggatggaatccaaggccatctccgatgctcaaattacggctagctcctatttcaccaacatgttcgcgacctggtcgccgtctaaagccagactgcatctacaaggccggtccaatgcgtggcgcccccaagtcaacaacccgaaggagtggctccaggtcgactttcaaaagactatgaaagtcaccggagtgactactcagggagtgaagtcacttctcacttctatgtacgtgaaggaattcctgatctcgtcgtcccaagacggtcatcagtggactctcttcttccaaaacggcaaagtcaaggtgttccagggcaaccaggactccttcacccccgtcgtgaactcccttgatccccctctgctgactcgctacctgaggatccaccctcagtcctgggtgcaccagatcgcactcaggatggaagtgttgggctgcgaggcccaggacctgtactaa

SEQ ID NO: 88 - DNA, 4392 bp, Artificial Sequence
  Description of Artificial Sequence: Synthetic polynucleotide
atgcaaattgaactgtccacctgtttcttcctgtgcttgctcagattctgcttcagtgccaccagaagatactacctgggggctgttgagctgtcatgggactacatgcagagtgacctgggagagctccctgtggatgccaggttcccaccaagagtccccaagtccttccccttcaacacctcagtggtgtacaaaaagaccctctttgtggagttcactgaccacctgttcaacattgccaagcccagacccccctggatgggcctcttgggccctaccatccaagctgaagtgtatgacactgtggtgatcaccctgaagaacatggcctcccaccctgtgtccctgcatgctgtgggagtcagctactggaaggcctcagagggggcagaatatgatgaccagaccagccagagagaaaaggaagatgacaaggtgttccctgggggatcccacacctatgtgtggcaagtgctcaaggaaaatggtcccatggcctcagaccctctgtgtctgacctactcctacctctcccatgtggacctggtcaaggacctgaactcaggcttaattggagccctgcttgtgtgcagggagggttcccttgctaaggaaaagacccagaccctgcacaagttcatcctgctgtttgctgtctttgatgagggaaagtcctggcactcagaaactaagaacagcctgatgcaggacagggatgctgcctcagccagagcctggcccaagatgcacactgtgaatggttatgtgaacagaagcttgcctggcctcattggatgccacagaaaatcagtctactggcatgtcattggcatgggaaccacccctgaggtccacagcatcttcctggagggccataccttccttgtgagaaaccatagacaggcctcccttgaaatctcccccatcaccttcctcactgcccaaaccctcctcatggacttgggccagttcctcttgagctgccacatctccagccatcagcatgatggaatggaagcctatgtgaaggtggactcctgccctgaggagccccagctgagaatgaaaaacaatgaggaggcagaggattatgatgatgacctgactgactcagagatggatgtggtcaggtttgatgatgacaactccccttccttcattcaaattaggagtgtggccaagaaacaccccaaaacctgggtccactacattgcagcagaggaagaggactgggactatgcaccactggtgctggcccctgatgacaggtcctacaagtcccagtacctgaacaatggcccccagaggattggaagaaagtacaagaaagtcaggttcatggcctacactgatgaaaccttcaagaccagagaagccatccagcatgagtcaggcatcctgggaccacttctctatggggaagtgggggacaccctgctgatcatcttcaaaaaccaggcctccagaccctacaacatctacccccatggcatcactgatgtcaggcccctctactcaagaaggctgcccaagggagtcaagcaccttaaggacttccccattctgcctggagagatcttcaagtacaagtggactgtgactgtggaagatgggccaaccaagtcagaccccagatgcctgaccagatactacagcagctttgtcaacatggagagggacctggcctcaggactcattggtccactcctgatctgctacaaggaatcagtggaccagaggggaaaccagatcatgtcagacaagaggaatgtgatcctgttctctgtgtttgatgagaacaggtcctggtacctgacagaaaacatccagaggttcctgcctaacccagctggagtgcagctggaggacccagagttccaagcctccaacatcatgcacagcatcaatggatatgtgtttgacagccttcaactgtcagtgtgcctccatgaagtggcctactggtacatactgtccattggagcccagactgacttcctgtctgtgttcttctctggatacaccttcaagcacaagatggtgtatgaggacacactgaccctgttccctttctctggggaaactgtgttcatgagcatggagaaccctggcctgtggatcctgggctgccacaactcagacttcagaaacagagggatgactgccctgctgaaggtgtcctcctgtgacaagaacactggagactactatgaggactcctatgaggacatctcagcatacctcttgagcaagaacaatgccattgaacccaggagcttctcccaaaactccagacacccaagcaccagacaaaagcaattcaatgctaccaccattcctgaaaacacaaccctgcagtcagaccaggaggaaattgactatgatgacactatttctgtggaaatgaagaaggaggactttgacatctatgatgaagatgaaaaccagtcccctaggagcttccagaagaaaaccaggcactactttatagcagcagtggagagactgtgggactatggaatgtcctcctcccctcatgtgctgagaaacagagcccagtcaggatcagtgccccagttcaagaaggtggtgttccaggaattcactgatggatccttcacccaacccctgtacagaggggaattgaatgagcacctgggcctgctgggaccctacattagggctgaagtggaggacaacatcatggtcaccttcagaaaccaggcatccagaccttacagcttctacagctccctgatctcctatgaagaggaccagagacagggagctgagcccagaaagaactttgtcaagcccaatgagactaagacctacttctggaaagtgcagcaccacatggcccccaccaaggatgaatttgactgcaaggcctgggcctacttctctgatgtggatctggaaaaggatgtgcactctggtctgattggcccccttctggtctgccacaccaacactctgaaccctgcccatggtagacaggtcactgtgcaagagtttgccctcttcttcaccatctttgatgaaaccaagtcctggtacttcactgaaaacatggaaagaaactgcagggccccctgcaacatccaaatggaggaccccaccttcaaggagaactacaggttccatgccatcaatggctacatcatggataccctgcctggactggtcatggcccaggaccagaggatcagatggtacctcctgagcatgggcagcaatgagaacattcactccatccactttagtgggcatgtgttcactgtcaggaagaaggaagagtacaagatggccctgtacaacctgtaccctggagtgtttgagactgtggagatgctgcccagcaaagctggaatctggagggtggaatgcctgattggtgaacacctccatgctggaatgtccaccctcttcctggtgtactccaacaagtgccagactcctttggggatggcctcagggcacattagggacttccagatcactgcatcaggacagtatggccaatgggccccaaagctggccagactgcactactctggttccatcaatgcctggtccaccaaggaaccattctcctggatcaaggtggacctcctggcccccatgattattcatggaatcaagacccagggagccaggcagaagttctccagcctctacatcagccagttcatcatcatgtactcccttgatggaaagaagtggcagacctacagaggaaactccactggcaccctgatggtgttctttggcaatgtggactcctctggtatcaagcacaacatcttcaaccctccaatcattgccagatacatcagactgcacccaacccactactccattaggtccaccctgaggatggaactcatgggctgtgacctcaactcctgctccatgcctctgggcatggaatccaaggccatctcagatgcacaaattactgcctcctcctacttcaccaacatgtttgccacatggagcccttccaaggccaggctgcacctccaaggcagaagcaatgcctggaggccccaggtcaacaaccccaaggaatggctccaggtagacttccaaaagaccatgaaggtcactggagtcaccacccagggagtgaagtccctgctgacctctatgtatgtgaaggaattcctaatcagcagctcccaggatggtcaccagtggacccttttcttccaaaatgggaaagtgaaggtgttccaaggcaaccaggacagcttcacccctgtggtcaacagccttgaccctcccctgttgactagatacctcagaatccacccccagtcctgggtgcaccagattgccctgagaatggaagtgctgggctgtgaagcccaggacttgtactaa

SEQ ID NO: 89 - DNA, 4392 bp, Artificial Sequence
  Description of Artificial Sequence: Synthetic polynucleotide
atgcagattgaactctccacctgtttcttcctgtgcctgctgagattctgcttcagtgccaccaggaggtactacttgggtgcagtggagctctcctgggactacatgcagtcagacctgggagagctccctgtggatgccaggttccctccaagggtccctaaatccttccccttcaacacctcagtggtgtacaagaaaaccctgtttgtggaattcactgaccacctgttcaacattgccaagcccaggccaccctggatggggctcctgggcccaaccatccaagctgaagtgtatgacactgtggtcatcaccctcaagaacatggcctcccaccctgtctccctgcatgctgtgggagtgtcctactggaaggcctcagagggggctgagtatgatgaccagacctcccagagggaaaaggaagatgacaaggtgttcccaggaggatcccacacctatgtgtggcaagtcctgaaggaaaatggtcccatggcatcagaccccttgtgcttgacctactcctacctgagccatgtggacctggtcaaggacctgaactcaggccttattggagccctgcttgtatgcagagagggcagcctggccaaggaaaagacccagaccctgcacaagttcatcctcctgtttgctgtgtttgatgaaggaaagtcctggcactcagagactaagaacagcctgatgcaggacagggatgcagcatcagccagagcctggcccaagatgcacactgtgaatggatatgtgaacaggtccctccctggactaattggatgccacagaaagtctgtgtactggcatgtcattggaatgggcacaacccctgaagtgcatagcatcttcctggaaggacacaccttcctggtcaggaaccacagacaggcatccctggagatctccccaatcaccttcctgactgcccagactctcctgatggacctgggacagttcttgctttcctgccacatctcctcccaccaacatgatggcatggaagcctatgtgaaggtggactcctgccctgaggaacctcaactgaggatgaaaaacaatgaagaagctgaagattatgatgatgacctgactgactcagagatggatgttgtcagatttgatgatgacaacagccctagcttcatccagattagatctgtggccaagaagcaccccaagacctgggtgcactacattgctgctgaggaagaggactgggactatgcccccctggtgctggcccctgatgacagatcctacaagtcccagtacctgaacaatggtccccagagaattgggagaaagtacaagaaagtcagattcatggcctacactgatgaaaccttcaagactagagaagccatccagcatgagtcaggcattctgggtcccctgctgtatggggaagttggtgacaccctgctgatcatcttcaagaaccaagccagcaggccttacaacatctacccccatggaattacagatgtcaggccactgtactccaggagactgcctaagggagtcaagcacctcaaggacttccccatcctgcctggagaaatcttcaagtacaagtggactgtgactgtggaggatgggcctaccaagtcagaccctagatgcctgactaggtactactccagctttgtcaacatggagagagacttggcctcaggactcattggtccactgcttatttgctacaaggagtcagtggaccagagaggaaaccaaatcatgtctgacaagagaaatgtcatcctgttctcagtctttgatgagaacaggtcctggtacctgactgaaaacatccagagattcctgcccaaccctgctggggtgcaactggaggaccctgagttccaggcctcaaacataatgcacagcatcaatggctatgtctttgactccctgcaactgtcagtgtgcttgcatgaagtggcctactggtacatcctctccattggggcccagactgacttcctgtcagtgtttttctctggctacaccttcaagcataaaatggtgtatgaggacaccctcaccctgttccccttctctggagagactgtgttcatgagcatggaaaacccaggcctctggatccttggctgtcacaactcagacttcagaaacaggggcatgactgccctgcttaaggtgtccagctgtgacaagaacactggggactactatgaggactcctatgaggacatcagtgcctaccttctgtccaagaacaatgccattgaacctaggagcttcagccagaactccaggcacccaagcaccaggcagaagcagttcaatgccaccaccatccctgagaacactaccctgcaatcagaccaagaagaaattgactatgatgacaccatctcagtggagatgaagaaggaggactttgacatctatgatgaagatgaaaaccaaagccccagatccttccagaaaaagaccaggcactacttcattgcagcagtggagagattatgggactatgggatgtccagctcccctcatgtgctgagaaacagagcacagtctggctcagtgccccagttcaagaaggtggtgttccaggagttcactgatggttccttcacccaaccattgtacaggggagagctgaatgagcacctgggcctgttgggcccatacatcagagcagaagtggaggacaacatcatggtcaccttcagaaaccaggcctccagaccctactccttctactcctccctgatctcctatgaagaggaccaaagacagggagctgagcccagaaagaactttgtgaagccaaatgaaaccaagacctacttctggaaagtgcagcaccacatggcccccaccaaggatgagtttgactgcaaagcttgggcctacttcagtgatgtggacttggagaaggatgtgcactcaggtcttattggccctctgcttgtgtgccataccaacactcttaaccctgcacatggcagacaagtcactgtgcaggagtttgccctcttcttcaccatctttgatgaaacaaagtcctggtacttcacagaaaacatggaaaggaactgcagagccccttgcaacatccagatggaggaccccaccttcaaggaaaactacaggtttcatgccatcaatgggtacatcatggacaccctgcctggactggtcatggcccaggaccagaggatcagatggtatctgctcagcatgggaagcaatgagaacatccactccattcacttcagtggtcatgtgttcactgtcaggaaaaaggaggagtacaagatggccctctacaacctttaccctggagtgtttgaaactgtggaaatgctgccatccaaggctggcatctggagggtggaatgcctcattggtgaacacctccatgctggaatgtccaccctcttcctggtgtacagcaacaagtgccagacccccctgggaatggcttcagggcacatcagagacttccagatcactgcctctgggcagtatggacagtgggcccctaagctggccaggctccactactctggaagcatcaatgcctggtccactaaggagcccttctcctggatcaaagtggatctgctggcccccatgatcatccatggcattaagacccagggggccagacagaagttctcctccctctacataagccagttcattatcatgtacagcctggatgggaagaagtggcagacctacaggggcaactccactggaaccctgatggtgttctttgggaatgtggacagctcaggcatcaagcacaacatcttcaaccccccaatcattgccagatacatcaggctccaccccacccactacagcatcagatccaccctgagaatggaacttatgggctgtgacctcaactcctgtagcatgcccctgggcatggagtccaaggccatttcagatgcccaaatcactgcatcctcctacttcaccaacatgtttgccacttggagcccttccaaggccagactgcatctgcaaggcagatccaatgcctggaggccccaggtcaacaaccctaaggaatggctccaggtggacttccaaaagactatgaaagtcactggagtgaccacccagggagtgaagtccctgctgacctctatgtatgtgaaggaattcctcatctcctcaagccaagatggacaccagtggaccctgttcttccaaaatggaaaggtcaaagtgttccagggcaaccaggacagcttcacccctgtggtgaactccttggacccccccctgttgaccagatacctgaggatccacccccagtcctgggtccaccagattgccttgagaatggaggtgctgggctgtgaagcccaggacctctactaa

SEQ ID NO: 90 - DNA, 4392 bp, Artificial Sequence
  Description of Artificial Sequence: Synthetic polynucleotide
atgcagattgaactctccacctgtttcttcctgtgcctgctgagattctgcttcagtgccaccaggaggtactacttgggtgcagtggagctctcctgggactacatgcagtcagacctgggagagctccctgtggatgccaggttccctccaagggtccctaaatccttccccttcaacacctcagtggtgtacaagaaaaccctgtttgtggaattcactgaccacctgttcaacattgccaagcccaggccaccctggatggggctcctgggcccaaccatccaagctgaagtgtatgacactgtggtcatcaccctcaagaacatggcctcccaccctgtctccctgcatgctgtgggagtgtcctactggaaggcctcagagggggctgagtatgatgaccagacctcccagagggaaaaggaagatgacaaggtgttcccaggaggatcccacacctatgtgtggcaagtcctgaaggaaaatggtcccatggcatcagaccccttgtgcttgacctactcctacctgagccatgtggacctggtcaaggacctgaactcaggccttattggagccctgcttgtatgcagagagggcagcctggccaaggaaaagacccagaccctgcacaagttcatcctcctgtttgctgtgtttgatgaaggaaagtcctggcactcagagactaagaacagcctgatgcaggacagggatgcagcatcagccagagcctggcccaagatgcacactgtgaatggatatgtgaacaggtccctccctggactaattggatgccacagaaagtctgtgtactggcatgtcattggaatgggcacaacccctgaagtgcatagcatcttcctggaaggacacaccttcctggtcaggaaccacagacaggcatccctggagatctccccaatcaccttcctgactgcccagactctcctgatggacctgggacagttcttgctttcctgccacatctcctcacaccagcatgatggaatggaggcctatgtgaaagtggacagctgccctgaggaaccccagctgagaatgaagaacaatgaagaggctgaggattatgatgatgacctcactgactcagagatggatgtggtcagatttgatgatgacaacagccccagctttattcaaatcagatcagtggccaagaagcatcctaagacctgggtgcattacattgctgctgaagaggaagattgggactatgcccccctggtgctggcacctgatgataggtcctacaagagccagtacctgaacaatggaccccagaggattggcaggaagtacaagaaggtcagattcatggcctacactgatgaaaccttcaagaccagagaggccatccagcatgagtcaggaattctgggacccctcctctatggggaagtgggagacaccctgctcatcatcttcaagaaccaggcctccagaccatacaacatctacccccatggaattactgatgtcagaccactgtactccagaagattgccaaagggagtgaagcacctgaaagacttcccaatcttgcctggggaaattttcaagtacaagtggactgtgactgtggaagatgggccaactaagtcagatcccagatgcctcactagatactactcatcctttgtgaacatggagagggacctggcttcaggactgattggcccactgctgatttgttacaaggagtcagtggatcagagaggaaaccagattatgtcagacaagaggaatgtcatcctgttcagtgtgtttgatgagaacaggagttggtacttgactgagaacattcagagattcctgccaaacccagcaggggtgcagttggaggaccctgagttccaggcttccaacatcatgcactctatcaatggctatgtgtttgactccctgcaactctctgtgtgcctgcatgaagtggcctactggtacattctctccattggtgcccagactgatttcctgtcagtgttcttctctggatacactttcaagcacaagatggtgtatgaggacaccctgaccctcttccccttctctggggaaactgtctttatgtccatggaaaaccctggactttggatcctggggtgtcacaacagtgatttcaggaacaggggaatgactgccctgctgaaagtgtcctcctgtgacaagaacactggggactactatgaagattcctatgaagatatctcagcctacctcctctccaaaaacaatgccattgagcctagatccttcagccaaaactccaggcaccccagcaccagacaaaagcaattcaatgcaaccaccatccctgagaacactaccctgcaatcagaccaagaagagattgactatgatgacaccatctcagtggagatgaagaaggaagattttgacatctatgatgaggatgagaaccagagcccaaggtccttccagaaaaagaccaggcactacttcattgcagctgtggaaagactgtgggactatggaatgtcctcctccccacatgtgctgaggaacagagcccagtcaggatcagtgccacagttcaagaaagtggtgttccaagaattcactgatggcagcttcactcagcccctgtacagaggagagctcaatgagcaccttggcctgctgggcccctacattagagctgaagtggaagataacatcatggtcactttcaggaaccaagccagcaggccttactcattctactcctcactgatcagctatgaagaggaccagagacagggagcagagcccagaaagaactttgtgaagccaaatgaaaccaagacctacttctggaaggtccagcaccatatggccccaaccaaggatgagtttgactgcaaggcctgggcctacttcagtgatgtggacctggaaaaggatgtgcactcagggctcattggacctcttctggtctgccataccaacaccctcaaccctgcccatggtagacaagtcactgtgcaagaatttgccctgttcttcaccatttttgatgaaactaaaagctggtacttcacagagaacatggaaagaaactgcagggccccctgcaacatccaaatggaggaccccactttcaaggaaaactacagattccatgccattaatggatacatcatggacaccctgcctggcttagtgatggcccaggaccaaaggatcagatggtacctgttgtccatgggttccaatgagaacatccactccatacatttctcaggacatgtgttcactgtcagaaagaaagaggagtacaagatggccctttacaacctttaccctggggtctttgaaactgtggagatgctgccatccaaggctggcatctggagagtggaatgcctgattggagaacacctccatgctggaatgtccaccctcttcctggtgtactcaaacaagtgccagacccctctgggcatggcctcaggacacattagggacttccagatcactgcctctggccagtatggtcaatgggcccccaagcttgccagactgcattactctgggtccatcaatgcctggagcaccaaggaacctttctcctggatcaaagtggacctcctggcccccatgattatccatggcatcaagacccagggagccaggcagaagttctcctccctgtacattagccaattcatcattatgtacagcctggatggaaagaagtggcagacctacagaggaaacagcactggcaccctgatggtcttttttggcaatgtggacagctctgggatcaagcataacatcttcaaccctcccataattgcaagatacatcaggctgcaccccacccactacagcatcaggtccaccctgagaatggagctcatgggctgtgacctgaacagctgctccatgcctctgggaatggaatccaaagccatctcagatgcccaaatcacagcctcctcctacttcaccaacatgtttgctacctggagcccttccaaagccaggctgcacttacaaggaagaagcaatgcatggaggcctcaggtcaacaaccccaaggagtggctgcaagtggacttccaaaagaccatgaaagtcactggagtgaccactcaaggagtgaagtccctgttgaccagcatgtatgtcaaggaatttctgatctcaagctcccaagatggccatcagtggactctgttcttccaaaatggaaaggtcaaggtgttccagggcaaccaggacagctttacccctgttgtgaactccctggacccccccctgctgactagatacttgagaatccacccccagtcctgggtgcaccagattgcattgagaatggaagtccttggctgtgaagcccaggacctgtactaa

SEQ ID NO: 91 - DNA, 4335 bp, Artificial Sequence
  Description of Artificial Sequence: Synthetic polynucleotide
gccaccaggagatactacctgggggctgtggagctgtcctgggactacatgcagtcagacctgggggagctgccagttgatgccaggttcccccccagagtccccaagtccttccccttcaacacctcagtggtgtacaaaaagaccctgtttgtggagttcacagaccacctgttcaacatagccaagcccaggcccccctggatgggcctgctgggccccaccatccaggcagaggtttatgacacagtggtcatcaccctgaagaacatggcctcccaccctgtgtccctccatgctgtgggggtgagctactggaaggccagtgagggggcagaatatgatgaccagaccagccagagggagaaggaggatgacaaggtgttcccagggggcagccacacctatgtgtggcaggtcctgaaggagaatggccccatggcctctgaccccctctgcctcacctactcctacctgtcccatgtggacctggtgaaggacctcaactctggcctgattggagccctcctggtgtgcagggaggggagcctggccaaggaaaagacccagaccctgcacaagtttatcctgctctttgcagtctttgatgaggggaagtcctggcacagtgagaccaagaactccctgatgcaggacagagatgctgcctcagccagggcctggcccaagatgcacacagtgaatgggtatgtcaacaggagcctgccaggcctgattgggtgccacagaaagtcagtgtactggcatgtcattggcatgggcaccaccccagaggtgcactccatcttcctggagggccacaccttcctggtgaggaaccacagacaggccagcctggagatcagcccaatcaccttcctcacagcccagaccctcctcatggacctgggccagtttctcctgttctgccacatctcctcccaccagcatgatggcatggaggcctatgtgaaggtggacagctgccctgaggagccccagctcaggatgaagaacaatgaggaggcagaggactatgatgatgatctgacagactctgagatggatgtggtgagatttgatgatgacaacagcccctccttcatccagatcaggtctgtggccaagaagcaccctaagacctgggtgcactacattgcagctgaggaggaggactgggactatgcccccctggtcctggcccctgatgataggtcctacaagtcccagtacctgaacaatggcccccagaggatagggagaaagtacaagaaggtgaggttcatggcctacactgatgagaccttcaagactagggaagccatccagcatgagtctgggatcctgggccccctcctctatggggaggtgggggacaccctgctgatcatcttcaagaaccaggccagcaggccctacaacatttacccccatgggatcacagatgtgagacccctgtacagcaggagactgccaaagggggtgaagcacctgaaggacttccccatcctgccaggggagatcttcaagtacaagtggactgtgacagtggaggatgggcccaccaaatctgaccctagatgcctgaccagatactacagcagctttgtgaacatggagagggacctggcctctggactgattggccctctgctgatctgctacaaggagagtgtggaccagaggggaaaccagatcatgtctgacaagaggaatgtgatcctgttctcagtgtttgatgagaacagatcctggtacctcactgagaacatccagaggttcctgcccaacccagcaggggtgcagctggaggacccagagttccaggcctccaacatcatgcactccatcaatggctatgtctttgactccctgcagctgtcagtgtgcctgcatgaggtggcctactggtacatcctctccattggagcccagactgacttcctgtcagtcttcttcagtggctacaccttcaagcacaagatggtctatgaggacactctgaccctgttccccttctctggggagactgtgttcatgtccatggagaaccctggactgtggatcctgggctgccacaacagtgacttcaggaacaggggcatgactgccctgctgaaggtctccagctgtgacaagaacactggggactactatgaggactcctatgaggacatctctgcctacctgctgtccaagaacaatgccattgagcccaggtccttctcccagaacagcagacacccctccaccaggcagaagcagttcaatgcaaccaccatccctgaaaataccaccctgcagagtgaccaggaggagattgactatgatgacaccatctctgtggagatgaagaaggaggactttgacatctatgatgaggatgagaaccagagccctagaagcttccagaagaagaccagacactacttcattgctgcagtggaaagactgtgggactatgggatgagctcctccccccatgtgctgaggaacagggcccagtctggctctgtgccccagttcaagaaggtggtgttccaggagttcactgatggctccttcacccagcccctgtacaggggagagctgaatgagcacctgggcctgctgggcccctacatcagggctgaggtggaggacaatatcatggtgaccttcagaaaccaggcctccagaccttactccttctacagcagcctgatctcctatgaggaggaccagagacagggggctgagcccaggaagaactttgtgaagcccaatgagaccaagacctacttctggaaggtgcagcaccacatggcccccaccaaggatgagtttgactgcaaggcctgggcctacttctctgatgtggacctggagaaggatgtgcactctggcctgattggccccctgctggtgtgccacaccaacaccctgaaccctgcccatggcaggcaggtgactgtgcaggagtttgccctgttcttcaccatctttgatgagaccaagagctggtacttcactgagaacatggagaggaactgcagggccccctgcaacatccagatggaggaccccaccttcaaggagaactacaggttccatgccatcaatggctacatcatggacaccctgcctggcctggtgatggcccaggaccagaggatcaggtggtacctgctgagcatggggagcaatgagaacatccacagcatccacttctctggccatgtgttcacagtgaggaagaaggaggagtacaagatggccctgtacaacctgtaccctggggtgtttgagacagtggagatgctgccctccaaggctggaatctggagggtggagtgcctgattggggagcacctgcatgctggcatgagcaccctgttcctggtgtacagcaacaagtgccagacccccctgggcatggcctctggccacatcagagacttccagatcacagcctcaggccagtatggccagtgggcccccaagctggccaggctgcactactctggcagcatcaatgcctggtccaccaaggagcccttcagctggatcaaggtggacctcctggcccccatgatcatccatggcatcaagacccagggggccaggcagaagttcagctccctgtacatctcccagttcatcatcatgtactccctggatggcaagaagtggcagacctacagaggcaacagcacaggcaccctgatggtgttctttggcaatgtggacagctctgggatcaagcacaacatcttcaacccccccatcattgccaggtacatcagactgcaccccacccactactccatcaggtccaccctgagaatggagctgatgggctgtgacctgaacagctgcagcatgcccctgggcatggagagcaaggccatctctgatgcccagatcacagccagcagctacttcaccaacatgtttgccacctggtcccccagcaaggccaggctgcacctgcagggcaggagcaatgcctggaggccccaggtgaacaaccccaaggagtggctgcaggtggacttccagaagaccatgaaggtgacaggggtgaccacccagggggtgaagtccctgctgaccagcatgtatgtgaaggagttcctgatcagcagctcccaggatggccaccagtggaccctgttcttccagaatggcaaggtgaaggtgttccagggcaaccaggacagcttcacccctgtggtgaactccctggacccccccctgctgaccagatacctgaggatccacccccagtcctgggtgcaccagattgccctgagaatggaggtgctgggctgtgaggcccaggacctgtactga

SEQ ID NO: 92 - DNA, 4335 bp, Artificial Sequence
  Description of Artificial Sequence: Synthetic polynucleotide
gccaccaggagatactacctgggggctgtggagctgagctgggactacatgcagtctgacctgggggagctgcctgtggatgccaggttcccccccagagtgcccaagagcttccccttcaacacctctgtggtgtacaagaagaccctgtttgtggagttcactgaccacctgttcaacattgccaagcccaggcccccctggatgggcctgctgggccccaccatccaggctgaggtgtatgacactgtggtgatcaccctgaagaacatggccagccaccctgtgagcctgcatgctgtgggggtgagctactggaaggcctctgagggggctgagtatgatgaccagaccagccagagggagaaggaggatgacaaggtgttccctgggggcagccacacctatgtgtggcaggtgctgaaggagaatggccccatggcctctgaccccctgtgcctgacctacagctacctgagccatgtggacctggtgaaggacctgaactctggcctgattggggccctgctggtgtgcagggagggcagcctggccaaggagaagacccagaccctgcacaagttcatcctgctgtttgctgtgtttgatgagggcaagagctggcactctgaaaccaagaacagcctgatgcaggacagggatgctgcctctgccagggcctggcccaagatgcacactgtgaatggctatgtgaacaggagcctgcctggcctgattggctgccacaggaagtctgtgtactggcatgtgattggcatgggcaccacccctgaggtgcacagcatcttcctggagggccacaccttcctggtcaggaaccacaggcaggccagcctggagatcagccccatcaccttcctgactgcccagaccctgctgatggacctgggccagttcctgctgttctgccacatcagcagccaccagcatgatggcatggaggcctatgtgaaggtggacagctgccctgaggagccccagctgaggatgaagaacaatgaggaggctgaggactatgatgatgacctgactgactctgagatggatgtggtgaggtttgatgatgacaacagccccagcttcatccagatcaggtctgtggccaagaagcaccccaagacctgggtgcactacattgctgctgaggaggaggactgggactatgcccccctggtgctggcccctgatgacaggagctacaagagccagtacctgaacaatggcccccagaggattggcaggaagtacaagaaggtcaggttcatggcctacactgatgaaaccttcaagaccagggaggccatccagcatgagtctggcatcctgggccccctgctgtatggggaggtgggggacaccctgctgatcatcttcaagaaccaggccagcaggccctacaacatctacccccatggcatcactgatgtgaggcccctgtacagcaggaggctgcccaagggggtgaagcacctgaaggacttccccatcctgcctggggagatcttcaagtacaagtggactgtgactgtggaggatggccccaccaagtctgaccccaggtgcctgaccagatactacagcagctttgtgaacatggagagggacctggcctctggcctgattggccccctgctgatctgctacaaggagtctgtggaccagaggggcaaccagatcatgtctgacaagaggaatgtgatcctgttctctgtgtttgatgagaacaggagctggtacctgactgagaacatccagaggttcctgcccaaccctgctggggtgcagctggaggaccctgagttccaggccagcaacatcatgcacagcatcaatggctatgtgtttgacagcctgcagctgtctgtgtgcctgcatgaggtggcctactggtacatcctgagcattggggcccagactgacttcctgtctgtgttcttctctggctacaccttcaagcacaagatggtgtatgaggacaccctgaccctgttccccttctctggggagactgtgttcatgagcatggagaaccctggcctgtggattctgggctgccacaactctgacttcaggaacaggggcatgactgccctgctgaaagtctccagctgtgacaagaacactggggactactatgaggacagctatgaggacatctctgcctacctgctgagcaagaacaatgccattgagcccaggagcttcagccagaatagcaggcaccccagcaccaggcagaagcagttcaatgccaccaccatcccagagaataccaccctgcagtctgaccaggaggagattgactatgatgacaccatctctgtggagatgaagaaggaggactttgacatctacgacgaggacgagaaccagagccccaggagcttccagaagaagaccaggcactacttcattgctgctgtggagaggctgtgggactatggcatgagcagcagcccccatgtgctgaggaacagggcccagtctggctctgtgccccagttcaagaaggtggtgttccaggagttcactgatggcagcttcacccagcccctgtacagaggggagctgaatgagcacctgggcctgctgggcccctacatcagggctgaggtggaggacaacatcatggtgaccttcaggaaccaggccagcaggccctacagcttctacagcagcctgatcagctatgaggaggaccagaggcagggggctgagcccaggaagaactttgtgaagcccaatgaaaccaagacctacttctggaaggtgcagcaccacatggcccccaccaaggatgagtttgactgcaaggcctgggcctacttctctgatgtggacctggagaaggatgtgcactctggcctgattggccccctgctggtgtgccacaccaacaccctgaaccctgcccatggcaggcaggtgactgtgcaggagtttgccctgttcttcaccatctttgatgaaaccaagagctggtacttcactgagaacatggagaggaactgcagggccccctgcaacatccagatggaggaccccaccttcaaggagaactacaggttccatgccatcaatggctacatcatggacaccctgcctggcctggtgatggcccaggaccagaggatcaggtggtacctgctgagcatgggcagcaatgagaacatccacagcatccacttctctggccatgtgttcactgtgaggaagaaggaggagtacaagatggccctgtacaacctgtaccctggggtgtttgagactgtggagatgctgcccagcaaggctggcatctggagggtggagtgcctgattggggagcacctgcatgctggcatgagcaccctgttcctggtgtacagcaacaagtgccagacccccctgggcatggcctctggccacatcagggacttccagatcactgcctctggccagtatggccagtgggcccccaagctggccaggctgcactactctggcagcatcaatgcctggagcaccaaggagcccttcagctggatcaaggtggacctgctggcccccatgatcatccatggcatcaagacccagggggccaggcagaagttcagcagcctgtacatcagccagttcatcatcatgtacagcctggatggcaagaagtggcagacctacaggggcaacagcactggcaccctgatggtgttctttggcaatgtggacagctctggcatcaagcacaacatcttcaacccccccatcattgccagatacatcaggctgcaccccacccactacagcatcaggagcaccctgaggatggagctgatgggctgtgacctgaacagctgcagcatgcccctgggcatggagagcaaggccatctctgatgcccagatcactgccagcagctacttcaccaacatgtttgccacctggagccccagcaaggccaggctgcacctgcagggcaggagcaatgcctggaggccccaggtcaacaaccccaaggagtggctgcaggtggacttccagaagaccatgaaggtgactggggtgaccacccagggggtgaagagcctgctgaccagcatgtatgtgaaggagttcctgatcagcagcagccaggatggccaccagtggaccctgttcttccagaatggcaaggtgaaggtgttccagggcaaccaggacagcttcacccctgtggtgaacagcctggacccccccctgctgaccagatacctgaggattcacccccagagctgggtgcaccagattgccctgaggatggaggtgctgggctgtgaggcccaggacctgtactga

SEQ ID NO: 93 - DNA, 4392 bp, Artificial Sequence
  Description of Artificial Sequence: Synthetic polynucleotide
atgcaaatagagctctccacctgcttctttctgtgccttttgcgattctgctttagtgccaccagaagatactacctgggtgcagtggaactgtcatgggactatatgcaaagtgatctcggtgagctgcctgtggacgcaagatttcctcctagagtgccaaaatcttttccattcaacacctcagtcgtgtacaaaaagactctgtttgtagaattcacggatcaccttttcaacatcgctaagccaaggccaccctggatgggtctgctaggtcctaccatccaggctgaggtttatgatacagtggtcattacacttaagaacatggcttcccatcctgtcagtcttcatgctgttggtgtatcctactggaaagcttctgagggagctgaatatgatgatcagaccagtcaaagggagaaagaagatgataaagtcttccctggtggaagccatacatatgtctggcaggtcctgaaagagaatggtccaatggcctctgacccactgtgccttacctactcatatctttctcatgtggacctggtaaaagacttgaattcaggcctcattggagccctactagtatgtagagaagggagtctggccaaggaaaagacacagaccttgcacaaatttatactactttttgctgtatttgatgaagggaaaagttggcactcagaaacaaagaactccttgatgcaggatagggatgctgcatctgctcgggcctggcctaaaatgcacacagtcaatggttatgtaaacaggtctctgccaggtctgattggatgccacaggaaatcagtctattggcatgtgattggaatgggcaccactcctgaagtgcactcaatattcctcgaaggtcacacatttcttgtgaggaaccatcgccaggcgtccttggaaatctcgccaataactttccttactgctcaaacactcttgatggaccttggacagtttctactgttttgtcatatctcttcccaccaacatgatggcatggaagcttatgtcaaagtagacagctgtccagaggaaccccaactacgaatgaaaaataatgaagaagcggaagactatgatgatgatcttactgattctgaaatggatgtggtcaggtttgatgatgacaactctccttcctttatccaaattcgctcagttgccaagaagcatcctaaaacttgggtacattacattgctgctgaagaggaggactgggactatgctcccttagtcctcgcccccgatgacagaagttataaaagtcaatatttgaacaatggccctcagcggattggtaggaagtacaaaaaagtccgatttatggcatacacagatgaaacctttaagactcgtgaagctattcagcatgaatcaggaatcttgggacctttactttatggggaagttggagacacactgttgattatatttaagaatcaagcaagcagaccatataacatctaccctcacggaatcactgatgtccgtcctttgtattcaaggagattaccaaaaggtgtaaaacatttgaaggattttccaattctgccaggagaaatattcaaatataaatggacagtgactgtagaagatgggccaactaaatcagatcctcggtgcctgacccgctattactctagtttcgttaatatggagagagatctagcttcaggactcattggccctctcctcatctgctacaaagaatctgtagatcaaagaggaaaccagataatgtcagacaagaggaatgtcatcctgttttctgtatttgatgagaaccgaagctggtacctcacagagaatatacaacgctttctccccaatccagctggagtgcagcttgaggatccagagttccaagcctccaacatcatgcacagcatcaatggctatgtttttgatagtttgcagttgtcagtttgtttgcatgaggtggcatactggtacattctaagcattggagcacagactgacttcctttctgtcttcttctctggatataccttcaaacacaaaatggtctatgaagacacactcaccctattcccattctcaggagaaactgtcttcatgtcgatggaaaacccaggtctatggattctggggtgccacaactcagactttcggaacagaggcatgaccgccttactgaaggtttctagttgtgacaagaacactggtgattattacgaggacagttatgaagatatttcagcatacttgctgagtaaaaacaatgccattgaaccaagaagcttctcccagaattcaagacaccctagcactaggcaaaagcaatttaatgccaccacaattccagaaaatactactcttcagtcagatcaagaggaaattgactatgatgataccatatcagttgaaatgaagaaggaagattttgacatttatgatgaggatgaaaatcagagcccccgcagctttcaaaagaaaacacgacactattttattgctgcagtggagaggctctgggattatgggatgagtagctccccacatgttctaagaaacagggctcagagtggcagtgtccctcagttcaagaaagttgttttccaggaatttactgatggctcctttactcagcccttataccgtggagaactaaatgaacatttgggactcctggggccatatataagagcagaagttgaagataatatcatggtaactttcagaaatcaggcctctcgtccctattccttctattctagccttatttcttatgaggaagatcagaggcaaggagcagaacctagaaaaaactttgtcaagcctaatgaaaccaaaacttacttttggaaagtgcaacatcatatggcacccactaaagatgagtttgactgcaaagcctgggcttatttctctgatgttgacctggaaaaagatgtgcactcaggcctgattggaccccttctggtctgccacactaacacactgaaccctgctcatgggagacaagtgacagtacaggaatttgctctgtttttcaccatctttgatgagaccaaaagctggtacttcactgaaaatatggaaagaaactgcagggctccctgcaatatccagatggaagatcccacttttaaagagaattatcgcttccatgcaatcaatggctacataatggatacactacctggcttagtaatggctcaggatcaaaggattcgatggtatctgctcagcatgggcagcaatgaaaacatccattctattcatttcagtggacatgtgttcactgtacgaaaaaaagaggagtataaaatggcactgtacaatctctatccaggtgtttttgagacagtggaaatgttaccatccaaagctggaatttggcgggtggaatgccttattggcgagcatctacatgctgggatgagcacactttttctggtgtacagcaataagtgtcagactcccctgggaatggcttctggacacattagagattttcagattacagcttcaggacaatatggacagtgggccccaaagctggccagacttcattattccggatcaatcaatgcctggagcaccaaggagcccttttcttggatcaaggtggatctgttggcaccaatgattattcacggcatcaagacccagggtgcccgtcagaagttctccagcctctacatctctcagtttatcatcatgtatagtcttgatgggaagaagtggcagacttatcgaggaaattccactggaaccttaatggtcttctttggcaatgtggattcatctgggataaaacacaatatttttaaccctccaattattgctcgatacatccgtttgcacccaactcattatagcattcgcagcactcttcgcatggagttgatgggctgtgatttaaatagttgcagcatgccattgggaatggagagtaaagcaatatcagatgcacagattactgcttcatcctactttaccaatatgtttgccacctggtctccttcaaaagctcgacttcacctccaagggaggagtaatgcctggagacctcaggtgaataatccaaaagagtggctgcaagtggacttccagaagacaatgaaagtcacaggagtaactactcagggagtaaaatctctgcttaccagcatgtatgtgaaggagttcctcatctccagcagtcaagatggccatcagtggactctcttttttcagaatggcaaagtaaaggtttttcagggaaatcaagactccttcacacctgtggtgaactctctagacccaccgttactgactcgctaccttcgaattcacccccagagttgggtgcaccagattgccctgaggatggaggttctgggctgcgaggcacaggacctctactga

SEQ ID NO: 94 - DNA, 4542 bp, Artificial Sequence
  Description of Artificial Sequence: Synthetic polynucleotide
atgcaaattgagttatccacctgtttcttcctctgtctcctgaggttctgcttctctgccaccaggagatactacctgggggctgtggagctgtcctgggactacatgcagtcagacctgggggagctgccagttgatgccaggtaaaggcatgtcctgtagggtctgatcggggccaggattgtggggatgtctccttgctaatagtagaaaagagtagtatggaagcattacttccagctgctttttgaagtgtccaccaaaatgaacgactttttcctttcttcacgcaggttcccccccagagtccccaagtccttccccttcaacacctcagtggtgtacaaaaagaccctgtttgtggagttcacagaccacctgttcaacatagccaagcccaggcccccctggatgggcctgctgggccccaccatccaggcagaggtttatgacacagtggtcatcaccctgaagaacatggcctcccaccctgtgtccctccatgctgtgggggtgagctactggaaggccagtgagggggcagaatatgatgaccagaccagccagagggagaaggaggatgacaaggtgttcccagggggcagccacacctatgtgtggcaggtcctgaaggagaatggccccatggcctctgaccccctctgcctcacctactcctacctgtcccatgtggacctggtgaaggacctcaactctggcctgattggagccctcctggtgtgcagggaggggagcctggccaaggaaaagacccagaccctgcacaagtttatcctgctctttgcagtctttgatgaggggaagtcctggcacagtgagaccaagaactccctgatgcaggacagagatgctgcctcagccagggcctggcccaagatgcacacagtgaatgggtatgtcaacaggagcctgccaggcctgattgggtgccacagaaagtcagtgtactggcatgtcattggcatgggcaccaccccagaggtgcactccatcttcctggagggccacaccttcctggtgaggaaccacagacaggccagcctggagatcagcccaatcaccttcctcacagcccagaccctcctcatggacctgggccagtttctcctgagctgccacatctcctcccaccagcatgatggcatggaggcctatgtgaaggtggacagctgccctgaggagccccagctcaggatgaagaacaatgaggaggcagaggactatgatgatgatctgacagactctgagatggatgtggtgagatttgatgatgacaacagcccctccttcatccagatcaggtctgtggccaagaagcaccctaagacctgggtgcactacattgcagctgaggaggaggactgggactatgcccccctggtcctggcccctgatgataggtcctacaagtcccagtacctgaacaatggcccccagaggatagggagaaagtacaagaaggtgaggttcatggcctacactgatgagaccttcaagactagggaagccatccagcatgagtctgggatcctgggccccctcctctatggggaggtgggggacaccctgctgatcatcttcaagaaccaggccagcaggccctacaacatttacccccatgggatcacagatgtgagacccctgtacagcaggagactgccaaagggggtgaagcacctgaaggacttccccatcctgccaggggagatcttcaagtacaagtggactgtgacagtggaggatgggcccaccaaatctgaccctagatgcctgaccagatactacagcagctttgtgaacatggagagggacctggcctctggactgattggccctctgctgatctgctacaaggagagtgtggaccagaggggaaaccagatcatgtctgacaagaggaatgtgatcctgttctcagtgtttgatgagaacagatcctggtacctcactgagaacatccagaggttcctgcccaacccagcaggggtgcagctggaggacccagagttccaggcctccaacatcatgcactccatcaatggctatgtctttgactccctgcagctgtcagtgtgcctgcatgaggtggcctactggtacatcctctccattggagcccagactgacttcctgtcagtcttcttcagtggctacaccttcaagcacaagatggtctatgaggacactctgaccctgttccccttctctggggagactgtgttcatgtccatggagaaccctggactgtggatcctgggctgccacaacagtgacttcaggaacaggggcatgactgccctgctgaaggtctccagctgtgacaagaacactggggactactatgaggactcctatgaggacatctctgcctacctgctgtccaagaacaatgccattgagcccaggtccttctcccagaacagcagacacccctccaccaggcagaagcagttcaatgcaaccaccatccctgaaaataccaccctgcagagtgaccaggaggagattgactatgatgacaccatctctgtggagatgaagaaggaggactttgacatctatgatgaggatgagaaccagagccctagaagcttccagaagaagaccagacactacttcattgctgcagtggaaagactgtgggactatgggatgagctcctccccccatgtgctgaggaacagggcccagtctggctctgtgccccagttcaagaaggtggtgttccaggagttcactgatggctccttcacccagcccctgtacaggggagagctgaatgagcacctgggcctgctgggcccctacatcagggctgaggtggaggacaatatcatggtgaccttcagaaaccaggcctccagaccttactccttctacagcagcctgatctcctatgaggaggaccagagacagggggctgagcccaggaagaactttgtgaagcccaatgagaccaagacctacttctggaaggtgcagcaccacatggcccccaccaaggatgagtttgactgcaaggcctgggcctacttctctgatgtggacctggagaaggatgtgcactctggcctgattggccccctgctggtgtgccacaccaacaccctgaaccctgcccatggcaggcaggtgactgtgcaggagtttgccctgttcttcaccatctttgatgagaccaagagctggtacttcactgagaacatggagaggaactgcagggccccctgcaacatccagatggaggaccccaccttcaaggagaactacaggttccatgccatcaatggctacatcatggacaccctgcctggcctggtgatggcccaggaccagaggatcaggtggtacctgctgagcatggggagcaatgagaacatccacagcatccacttctctggccatgtgttcacagtgaggaagaaggaggagtacaagatggccctgtacaacctgtaccctggggtgtttgagacagtggagatgctgccctccaaggctggaatctggagggtggagtgcctgattggggagcacctgcatgctggcatgagcaccctgttcctggtgtacagcaacaagtgccagacccccctgggcatggcctctggccacatcagagacttccagatcacagcctcaggccagtatggccagtgggcccccaagctggccaggctgcactactctggcagcatcaatgcctggtccaccaaggagcccttcagctggatcaaggtggacctcctggcccccatgatcatccatggcatcaagacccagggggccaggcagaagttcagctccctgtacatctcccagttcatcatcatgtactccctggatggcaagaagtggcagacctacagaggcaacagcacaggcaccctgatggtgttctttggcaatgtggacagctctgggatcaagcacaacatcttcaacccccccatcattgccaggtacatcagactgcaccccacccactactccatcaggtccaccctgagaatggagctgatgggctgtgacctgaacagctgcagcatgcccctgggcatggagagcaaggccatctctgatgcccagatcacagccagcagctacttcaccaacatgtttgccacctggtcccccagcaaggccaggctgcacctgcagggcaggagcaatgcctggaggccccaggtgaacaaccccaaggagtggctgcaggtggacttccagaagaccatgaaggtgacaggggtgaccacccagggggtgaagtccctgctgaccagcatgtatgtgaaggagttcctgatcagcagctcccaggatggccaccagtggaccctgttcttccagaatggcaaggtgaaggtgttccagggcaaccaggacagcttcacccctgtggtgaactccctggacccccccctgctgaccagatacctgaggatccacccccagtcctgggtgcaccagattgccctgagaatggaggtgctgggctgtgaggcccaggacctgtactga

SEQ ID NO: 95 - DNA, 4642 bp, Artificial Sequence
  Description of Artificial Sequence: Synthetic polynucleotide
atgcaaattgagttatccacctgtttcttcctctgtctcctgaggttctgcttctctgccaccaggagatactacctgggggctgtggagctgtcctgggactacatgcagtcagacctgggggagctgccagttgatgccaggtaaaggcatgtcctgtagggtctgatcggggccaggattgtggggatgttatgattcttatcatatggcacctaatgtatcagttgagttgtgaaaacagtgtttcggtttaatggatgttagggatttatatacaacttcaaatttgcctccttgctaatagtagaaaagagtagtatggaagcattacttccagctgctttttgaagtgtccaccaaaatgaacgactttttcctttcttcacgcaggttcccccccagagtccccaagtccttccccttcaacacctcagtggtgtacaaaaagaccctgtttgtggagttcacagaccacctgttcaacatagccaagcccaggcccccctggatgggcctgctgggccccaccatccaggcagaggtttatgacacagtggtcatcaccctgaagaacatggcctcccaccctgtgtccctccatgctgtgggggtgagctactggaaggccagtgagggggcagaatatgatgaccagaccagccagagggagaaggaggatgacaaggtgttcccagggggcagccacacctatgtgtggcaggtcctgaaggagaatggccccatggcctctgaccccctctgcctcacctactcctacctgtcccatgtggacctggtgaaggacctcaactctggcctgattggagccctcctggtgtgcagggaggggagcctggccaaggaaaagacccagaccctgcacaagtttatcctgctctttgcagtctttgatgaggggaagtcctggcacagtgagaccaagaactccctgatgcaggacagagatgctgcctcagccagggcctggcccaagatgcacacagtgaatgggtatgtcaacaggagcctgccaggcctgattgggtgccacagaaagtcagtgtactggcatgtcattggcatgggcaccaccccagaggtgcactccatcttcctggagggccacaccttcctggtgaggaaccacagacaggccagcctggagatcagcccaatcaccttcctcacagcccagaccctcctcatggacctgggccagtttctcctgagctgccacatctcctcccaccagcatgatggcatggaggcctatgtgaaggtggacagctgccctgaggagccccagctcaggatgaagaacaatgaggaggcagaggactatgatgatgatctgacagactctgagatggatgtggtgagatttgatgatgacaacagcccctccttcatccagatcaggtctgtggccaagaagcaccctaagacctgggtgcactacattgcagctgaggaggaggactgggactatgcccccctggtcctggcccctgatgataggtcctacaagtcccagtacctgaacaatggcccccagaggatagggagaaagtacaagaaggtgaggttcatggcctacactgatgagaccttcaagactagggaagccatccagcatgagtctgggatcctgggccccctcctctatggggaggtgggggacaccctgctgatcatcttcaagaaccaggccagcaggccctacaacatttacccccatgggatcacagatgtgagacccctgtacagcaggagactgccaaagggggtgaagcacctgaaggacttccccatcctgccaggggagatcttcaagtacaagtggactgtgacagtggaggatgggcccaccaaatctgaccctagatgcctgaccagatactacagcagctttgtgaacatggagagggacctggcctctggactgattggccctctgctgatctgctacaaggagagtgtggaccagaggggaaaccagatcatgtctgacaagaggaatgtgatcctgttctcagtgtttgatgagaacagatcctggtacctcactgagaacatccagaggttcctgcccaacccagcaggggtgcagctggaggacccagagttccaggcctccaacatcatgcactccatcaatggctatgtctttgactccctgcagctgtcagtgtgcctgcatgaggtggcctactggtacatcctctccattggagcccagactgacttcctgtcagtcttcttcagtggctacaccttcaagcacaagatggtctatgaggacactctgaccctgttccccttctctggggagactgtgttcatgtccatggagaaccctggactgtggatcctgggctgccacaacagtgacttcaggaacaggggcatgactgccctgctgaaggtctccagctgtgacaagaacactggggactactatgaggactcctatgaggacatctctgcctacctgctgtccaagaacaatgccattgagcccaggtccttctcccagaacagcagacacccctccaccaggcagaagcagttcaatgcaaccaccatccctgaaaataccaccctgcagagtgaccaggaggagattgactatgatgacaccatctctgtggagatgaagaaggaggactttgacatctatgatgaggatgagaaccagagccctagaagcttccagaagaagaccagacactacttcattgctgcagtggaaagactgtgggactatgggatgagctcctccccccatgtgctgaggaacagggcccagtctggctctgtgccccagttcaagaaggtggtgttccaggagttcactgatggctccttcacccagcccctgtacaggggagagctgaatgagcacctgggcctgctgggcccctacatcagggctgaggtggaggacaatatcatggtgaccttcagaaaccaggcctccagaccttactccttctacagcagcctgatctcctatgaggaggaccagagacagggggctgagcccaggaagaactttgtgaagcccaatgagaccaagacctacttctggaaggtgcagcaccacatggcccccaccaaggatgagtttgactgcaaggcctgggcctacttctctgatgtggacctggagaaggatgtgcactctggcctgattggccccctgctggtgtgccacaccaacaccctgaaccctgcccatggcaggcaggtgactgtgcaggagtttgccctgttcttcaccatctttgatgagaccaagagctggtacttcactgagaacatggagaggaactgcagggccccctgcaacatccagatggaggaccccaccttcaaggagaactacaggttccatgccatcaatggctacatcatggacaccctgcctggcctggtgatggcccaggaccagaggatcaggtggtacctgctgagcatggggagcaatgagaacatccacagcatccacttctctggccatgtgttcacagtgaggaagaaggaggagtacaagatggccctgtacaacctgtaccctggggtgtttgagacagtggagatgctgccctccaaggctggaatctggagggtggagtgcctgattggggagcacctgcatgctggcatgagcaccctgttcctggtgtacagcaacaagtgccagacccccctgggcatggcctctggccacatcagagacttccagatcacagcctcaggccagtatggccagtgggcccccaagctggccaggctgcactactctggcagcatcaatgcctggtccaccaaggagcccttcagctggatcaaggtggacctcctggcccccatgatcatccatggcatcaagacccagggggccaggcagaagttcagctccctgtacatctcccagttcatcatcatgtactccctggatggcaagaagtggcagacctacagaggcaacagcacaggcaccctgatggtgttctttggcaatgtggacagctctgggatcaagcacaacatcttcaacccccccatcattgccaggtacatcagactgcaccccacccactactccatcaggtccaccctgagaatggagctgatgggctgtgacctgaacagctgcagcatgcccctgggcatggagagcaaggccatctctgatgcccagatcacagccagcagctacttcaccaacatgtttgccacctggtcccccagcaaggccaggctgcacctgcagggcaggagcaatgcctggaggccccaggtgaacaaccccaaggagtggctgcaggtggacttccagaagaccatgaaggtgacaggggtgaccacccagggggtgaagtccctgctgaccagcatgtatgtgaaggagttcctgatcagcagctcccaggatggccaccagtggaccctgttcttccagaatggcaaggtgaaggtgttccagggcaaccaggacagcttcacccctgtggtgaactccctggacccccccctgctgaccagatacctgaggatccacccccagtcctgggtgcaccagattgccctgagaatggaggtgctgggctgtgaggcccaggacctgtactga

SEQ ID NO: 96 - DNA, 4792 bp, Artificial Sequence
  Description of Artificial Sequence: Synthetic polynucleotide
atgcaaattgagttatccacctgtttcttcctctgtctcctgaggttctgcttctctgccaccaggagatactacctgggggctgtggagctgtcctgggactacatgcagtcagacctgggggagctgccagttgatgccaggtaaaggcatgtcctgtagggtctgatcggggccaggattgtggggatgtaagtctgcttggaggaaggtgcagacatcgggttaggatggttgtgatgctacctgggccccaaagaaacatttctgggtaaggtgtgcacacatctgtgttattagcagaaatgctaactgccaattcttttcataggtctgacctatttatgattcttatcatatggcacctaatgtatcagttgagttgtgaaaacagtgtttcggtttaatggatgttagggatttatatacaacttcaaatttgcctccttgctaatagtagaaaagagtagtatggaagcattacttccagctgctttttgaagtgtccaccaaaatgaacgactttttcctttcttcacgcaggttcccccccagagtccccaagtccttccccttcaacacctcagtggtgtacaaaaagaccctgtttgtggagttcacagaccacctgttcaacatagccaagcccaggcccccctggatgggcctgctgggccccaccatccaggcagaggtttatgacacagtggtcatcaccctgaagaacatggcctcccaccctgtgtccctccatgctgtgggggtgagctactggaaggccagtgagggggcagaatatgatgaccagaccagccagagggagaaggaggatgacaaggtgttcccagggggcagccacacctatgtgtggcaggtcctgaaggagaatggccccatggcctctgaccccctctgcctcacctactcctacctgtcccatgtggacctggtgaaggacctcaactctggcctgattggagccctcctggtgtgcagggaggggagcctggccaaggaaaagacccagaccctgcacaagtttatcctgctctttgcagtctttgatgaggggaagtcctggcacagtgagaccaagaactccctgatgcaggacagagatgctgcctcagccagggcctggcccaagatgcacacagtgaatgggtatgtcaacaggagcctgccaggcctgattgggtgccacagaaagtcagtgtactggcatgtcattggcatgggcaccaccccagaggtgcactccatcttcctggagggccacaccttcctggtgaggaaccacagacaggccagcctggagatcagcccaatcaccttcctcacagcccagaccctcctcatggacctgggccagtttctcctgagctgccacatctcctcccaccagcatgatggcatggaggcctatgtgaaggtggacagctgccctgaggagccccagctcaggatgaagaacaatgaggaggcagaggactatgatgatgatctgacagactctgagatggatgtggtgagatttgatgatgacaacagcccctccttcatccagatcaggtctgtggccaagaagcaccctaagacctgggtgcactacattgcagctgaggaggaggactgggactatgcccccctggtcctggcccctgatgataggtcctacaagtcccagtacctgaacaatggcccccagaggatagggagaaagtacaagaaggtgaggttcatggcctacactgatgagaccttcaagactagggaagccatccagcatgagtctgggatcctgggccccctcctctatggggaggtgggggacaccctgctgatcatcttcaagaaccaggccagcaggccctacaacatttacccccatgggatcacagatgtgagacccctgtacagcaggagactgccaaagggggtgaagcacctgaaggacttccccatcctgccaggggagatcttcaagtacaagtggactgtgacagtggaggatgggcccaccaaatctgaccctagatgcctgaccagatactacagcagctttgtgaacatggagagggacctggcctctggactgattggccctctgctgatctgctacaaggagagtgtggaccagaggggaaaccagatcatgtctgacaagaggaatgtgatcctgttctcagtgtttgatgagaacagatcctggtacctcactgagaacatccagaggttcctgcccaacccagcaggggtgcagctggaggacccagagttccaggcctccaacatcatgcactccatcaatggctatgtctttgactccctgcagctgtcagtgtgcctgcatgaggtggcctactggtacatcctctccattggagcccagactgacttcctgtcagtcttcttcagtggctacaccttcaagcacaagatggtctatgaggacactctgaccctgttccccttctctggggagactgtgttcatgtccatggagaaccctggactgtggatcctgggctgccacaacagtgacttcaggaacaggggcatgactgccctgctgaaggtctccagctgtgacaagaacactggggactactatgaggactcctatgaggacatctctgcctacctgctgtccaagaacaatgccattgagcccaggtccttctcccagaacagcagacacccctccaccaggcagaagcagttcaatgcaaccaccatccctgaaaataccaccctgcagagtgaccaggaggagattgactatgatgacaccatctctgtggagatgaagaaggaggactttgacatctatgatgaggatgagaaccagagccctagaagcttccagaagaagaccagacactacttcattgctgcagtggaaagactgtgggactatgggatgagctcctccccccatgtgctgaggaacagggcccagtctggctctgtgccccagttcaagaaggtggtgttccaggagttcactgatggctccttcacccagcccctgtacaggggagagctgaatgagcacctgggcctgctgggcccctacatcagggctgaggtggaggacaatatcatggtgaccttcagaaaccaggcctccagaccttactccttctacagcagcctgatctcctatgaggaggaccagagacagggggctgagcccaggaagaactttgtgaagcccaatgagaccaagacctacttctggaaggtgcagcaccacatggcccccaccaaggatgagtttgactgcaaggcctgggcctacttctctgatgtggacctggagaaggatgtgcactctggcctgattggccccctgctggtgtgccacaccaacaccctgaaccctgcccatggcaggcaggtgactgtgcaggagtttgccctgttcttcaccatctttgatgagaccaagagctggtacttcactgagaacatggagaggaactgcagggccccctgcaacatccagatggaggaccccaccttcaaggagaactacaggttccatgccatcaatggctacatcatggacaccctgcctggcctggtgatggcccaggaccagaggatcaggtggtacctgctgagcatggggagcaatgagaacatccacagcatccacttctctggccatgtgttcacagtgaggaagaaggaggagtacaagatggccctgtacaacctgtaccctggggtgtttgagacagtggagatgctgccctccaaggctggaatctggagggtggagtgcctgattggggagcacctgcatgctggcatgagcaccctgttcctggtgtacagcaacaagtgccagacccccctgggcatggcctctggccacatcagagacttccagatcacagcctcaggccagtatggccagtgggcccccaagctggccaggctgcactactctggcagcatcaatgcctggtccaccaaggagcccttcagctggatcaaggtggacctcctggcccccatgatcatccatggcatcaagacccagggggccaggcagaagttcagctccctgtacatctcccagttcatcatcatgtactccctggatggcaagaagtggcagacctacagaggcaacagcacaggcaccctgatggtgttctttggcaatgtggacagctctgggatcaagcacaacatcttcaacccccccatcattgccaggtacatcagactgcaccccacccactactccatcaggtccaccctgagaatggagctgatgggctgtgacctgaacagctgcagcatgcccctgggcatggagagcaaggccatctctgatgcccagatcacagccagcagctacttcaccaacatgtttgccacctggtcccccagcaaggccaggctgcacctgcagggcaggagcaatgcctggaggccccaggtgaacaaccccaaggagtggctgcaggtggacttccagaagaccatgaaggtgacaggggtgaccacccagggggtgaagtccctgctgaccagcatgtatgtgaaggagttcctgatcagcagctcccaggatggccaccagtggaccctgttcttccagaatggcaaggtgaaggtgttccagggcaaccaggacagcttcacccctgtggtgaactccctggacccccccctgctgaccagatacctgaggatccacccccagtcctgggtgcaccagattgccctgagaatggaggtgctgggctgtgaggcccaggacctgtactga

SEQ ID NO: 97 - DNA, 5392 bp, Artificial Sequence
  Description of Artificial Sequence: Synthetic polynucleotide
atgcaaattgagttatccacctgtttcttcctctgtctcctgaggttctgcttctctgccaccaggagatactacctgggggctgtggagctgtcctgggactacatgcagtcagacctgggggagctgccagttgatgccaggtaaaggcatgtcctgtagggtctgatcggggccaggattgtggggatgtaagtctgcttggaggaaggtgcagacatcgggttaggatggttgtgatgctacctgggccccaaagaaacatttctgggtaaggtgtgcacacatctgtgttattagcagaaatgctaactgccaattcttttcataggtctgacctatttgttgatattttgttctgttttgtccattgcttctcttcgtcatatgctgctcctccagaatctagagactggagtagagggagggtgaagggacaaagacaaaacttccctctgcctgcccaagcttccatagagagaatcaaggcaatgaaatccaatcaatatcacacacaagtttcatgtctggttctcttgtgtgtacatgcaatgtgtgtttttataatatcttttcctactttgggtgtaaggataatatgagccttgagttcagaagcttttcgtgttttgggggttctggttgagtaattgggagtatctgagtggagacaagaatgaacattaatgtaggactgattctgaattacagcttctggcactagtaggtttcaatatacatagtctgctgaaaggtaattttctctgtgatattcctggtatccctaaggagggaagtataattttaggtacatactgacaaaatttgaacacaaggtacttagatgaaagttatagtctgttttagagatgaaattgaaggatgcagtagctattgctttggcaaaggatttttggctgatgcagtgtatggttattgattttatgattcttatcatatggcacctaatgtatcagttgagttgtgaaaacagtgtttcggtttaatggatgttagggatttatatacaacttcaaatttgcctccttgctaatagtagaaaagagtagtatggaagcattacttccagctgctttttgaagtgtccaccaaaatgaacgactttttcctttcttcacgcaggttcccccccagagtccccaagtccttccccttcaacacctcagtggtgtacaaaaagaccctgtttgtggagttcacagaccacctgttcaacatagccaagcccaggcccccctggatgggcctgctgggccccaccatccaggcagaggtttatgacacagtggtcatcaccctgaagaacatggcctcccaccctgtgtccctccatgctgtgggggtgagctactggaaggccagtgagggggcagaatatgatgaccagaccagccagagggagaaggaggatgacaaggtgttcccagggggcagccacacctatgtgtggcaggtcctgaaggagaatggccccatggcctctgaccccctctgcctcacctactcctacctgtcccatgtggacctggtgaaggacctcaactctggcctgattggagccctcctggtgtgcagggaggggagcctggccaaggaaaagacccagaccctgcacaagtttatcctgctctttgcagtctttgatgaggggaagtcctggcacagtgagaccaagaactccctgatgcaggacagagatgctgcctcagccagggcctggcccaagatgcacacagtgaatgggtatgtcaacaggagcctgccaggcctgattgggtgccacagaaagtcagtgtactggcatgtcattggcatgggcaccaccccagaggtgcactccatcttcctggagggccacaccttcctggtgaggaaccacagacaggccagcctggagatcagcccaatcaccttcctcacagcccagaccctcctcatggacctgggccagtttctcctgagctgccacatctcctcccaccagcatgatggcatggaggcctatgtgaaggtggacagctgccctgaggagccccagctcaggatgaagaacaatgaggaggcagaggactatgatgatgatctgacagactctgagatggatgtggtgagatttgatgatgacaacagcccctccttcatccagatcaggtctgtggccaagaagcaccctaagacctgggtgcactacattgcagctgaggaggaggactgggactatgcccccctggtcctggcccctgatgataggtcctacaagtcccagtacctgaacaatggcccccagaggatagggagaaagtacaagaaggtgaggttcatggcctacactgatgagaccttcaagactagggaagccatccagcatgagtctgggatcctgggccccctcctctatggggaggtgggggacaccctgctgatcatcttcaagaaccaggccagcaggccctacaacatttacccccatgggatcacagatgtgagacccctgtacagcaggagactgccaaagggggtgaagcacctgaaggacttccccatcctgccaggggagatcttcaagtacaagtggactgtgacagtggaggatgggcccaccaaatctgaccctagatgcctgaccagatactacagcagctttgtgaacatggagagggacctggcctctggactgattggccctctgctgatctgctacaaggagagtgtggaccagaggggaaaccagatcatgtctgacaagaggaatgtgatcctgttctcagtgtttgatgagaacagatcctggtacctcactgagaacatccagaggttcctgcccaacccagcaggggtgcagctggaggacccagagttccaggcctccaacatcatgcactccatcaatggctatgtctttgactccctgcagctgtcagtgtgcctgcatgaggtggcctactggtacatcctctccattggagcccagactgacttcctgtcagtcttcttcagtggctacaccttcaagcacaagatggtctatgaggacactctgaccctgttccccttctctggggagactgtgttcatgtccatggagaaccctggactgtggatcctgggctgccacaacagtgacttcaggaacaggggcatgactgccctgctgaaggtctccagctgtgacaagaacactggggactactatgaggactcctatgaggacatctctgcctacctgctgtccaagaacaatgccattgagcccaggtccttctcccagaacagcagacacccctccaccaggcagaagcagttcaatgcaaccaccatccctgaaaataccaccctgcagagtgaccaggaggagattgactatgatgacaccatctctgtggagatgaagaaggaggactttgacatctatgatgaggatgagaaccagagccctagaagcttccagaagaagaccagacactacttcattgctgcagtggaaagactgtgggactatgggatgagctcctccccccatgtgctgaggaacagggcccagtctggctctgtgccccagttcaagaaggtggtgttccaggagttcactgatggctccttcacccagcccctgtacaggggagagctgaatgagcacctgggcctgctgggcccctacatcagggctgaggtggaggacaatatcatggtgaccttcagaaaccaggcctccagaccttactccttctacagcagcctgatctcctatgaggaggaccagagacagggggctgagcccaggaagaactttgtgaagcccaatgagaccaagacctacttctggaaggtgcagcaccacatggcccccaccaaggatgagtttgactgcaaggcctgggcctacttctctgatgtggacctggagaaggatgtgcactctggcctgattggccccctgctggtgtgccacaccaacaccctgaaccctgcccatggcaggcaggtgactgtgcaggagtttgccctgttcttcaccatctttgatgagaccaagagctggtacttcactgagaacatggagaggaactgcagggccccctgcaacatccagatggaggaccccaccttcaaggagaactacaggttccatgccatcaatggctacatcatggacaccctgcctggcctggtgatggcccaggaccagaggatcaggtggtacctgctgagcatggggagcaatgagaacatccacagcatccacttctctggccatgtgttcacagtgaggaagaaggaggagtacaagatggccctgtacaacctgtaccctggggtgtttgagacagtggagatgctgccctccaaggctggaatctggagggtggagtgcctgattggggagcacctgcatgctggcatgagcaccctgttcctggtgtacagcaacaagtgccagacccccctgggcatggcctctggccacatcagagacttccagatcacagcctcaggccagtatggccagtgggcccccaagctggccaggctgcactactctggcagcatcaatgcctggtccaccaaggagcccttcagctggatcaaggtggacctcctggcccccatgatcatccatggcatcaagacccagggggccaggcagaagttcagctccctgtacatctcccagttcatcatcatgtactccctggatggcaagaagtggcagacctacagaggcaacagcacaggcaccctgatggtgttctttggcaatgtggacagctctgggatcaagcacaacatcttcaacccccccatcattgccaggtacatcagactgcaccccacccactactccatcaggtccaccctgagaatggagctgatgggctgtgacctgaacagctgcagcatgcccctgggcatggagagcaaggccatctctgatgcccagatcacagccagcagctacttcaccaacatgtttgccacctggtcccccagcaaggccaggctgcacctgcagggcaggagcaatgcctggaggccccaggtgaacaaccccaaggagtggctgcaggtggacttccagaagaccatgaaggtgacaggggtgaccacccagggggtgaagtccctgctgaccagcatgtatgtgaaggagttcctgatcagcagctcccaggatggccaccagtggaccctgttcttccagaatggcaaggtgaaggtgttccagggcaaccaggacagcttcacccctgtggtgaactccctggacccccccctgctgaccagatacctgaggatccacccccagtcctgggtgcaccagattgccctgagaatggaggtgctgggctgtgaggcccaggacctgtactga

SEQ ID NO: 98 - DNA, 4522 bp, Artificial Sequence
  Description of Artificial Sequence: Synthetic polynucleotide
atgcaaattgagttatccacctgtttcttcctctgtctcctgaggttctgcttctctgccaccaggagatactacctgggggctgtggagctgtcctgggactacatgcagtcagacctgggggagctgccagttgatgccaggttggtatcaaggttacaagacaggtttaaggagaccaatagaaactgggcatgtggagacagagaagactcttgggtttctgataggcactgactctctctgcctattggtctattttcccacccttaggttcccccccagagtccccaagtccttccccttcaacacctcagtggtgtacaaaaagaccctgtttgtggagttcacagaccacctgttcaacatagccaagcccaggcccccctggatgggcctgctgggccccaccatccaggcagaggtttatgacacagtggtcatcaccctgaagaacatggcctcccaccctgtgtccctccatgctgtgggggtgagctactggaaggccagtgagggggcagaatatgatgaccagaccagccagagggagaaggaggatgacaaggtgttcccagggggcagccacacctatgtgtggcaggtcctgaaggagaatggccccatggcctctgaccccctctgcctcacctactcctacctgtcccatgtggacctggtgaaggacctcaactctggcctgattggagccctcctggtgtgcagggaggggagcctggccaaggaaaagacccagaccctgcacaagtttatcctgctctttgcagtctttgatgaggggaagtcctggcacagtgagaccaagaactccctgatgcaggacagagatgctgcctcagccagggcctggcccaagatgcacacagtgaatgggtatgtcaacaggagcctgccaggcctgattgggtgccacagaaagtcagtgtactggcatgtcattggcatgggcaccaccccagaggtgcactccatcttcctggagggccacaccttcctggtgaggaaccacagacaggccagcctggagatcagcccaatcaccttcctcacagcccagaccctcctcatggacctgggccagtttctcctgagctgccacatctcctcccaccagcatgatggcatggaggcctatgtgaaggtggacagctgccctgaggagccccagctcaggatgaagaacaatgaggaggcagaggactatgatgatgatctgacagactctgagatggatgtggtgagatttgatgatgacaacagcccctccttcatccagatcaggtctgtggccaagaagcaccctaagacctgggtgcactacattgcagctgaggaggaggactgggactatgcccccctggtcctggcccctgatgataggtcctacaagtcccagtacctgaacaatggcccccagaggatagggagaaagtacaagaaggtgaggttcatggcctacactgatgagaccttcaagactagggaagccatccagcatgagtctgggatcctgggccccctcctctatggggaggtgggggacaccctgctgatcatcttcaagaaccaggccagcaggccctacaacatttacccccatgggatcacagatgtgagacccctgtacagcaggagactgccaaagggggtgaagcacctgaaggacttccccatcctgccaggggagatcttcaagtacaagtggactgtgacagtggaggatgggcccaccaaatctgaccctagatgcctgaccagatactacagcagctttgtgaacatggagagggacctggcctctggactgattggccctctgctgatctgctacaaggagagtgtggaccagaggggaaaccagatcatgtctgacaagaggaatgtgatcctgttctcagtgtttgatgagaacagatcctggtacctcactgagaacatccagaggttcctgcccaacccagcaggggtgcagctggaggacccagagttccaggcctccaacatcatgcactccatcaatggctatgtctttgactccctgcagctgtcagtgtgcctgcatgaggtggcctactggtacatcctctccattggagcccagactgacttcctgtcagtcttcttcagtggctacaccttcaagcacaagatggtctatgaggacactctgaccctgttccccttctctggggagactgtgttcatgtccatggagaaccctggactgtggatcctgggctgccacaacagtgacttcaggaacaggggcatgactgccctgctgaaggtctccagctgtgacaagaacactggggactactatgaggactcctatgaggacatctctgcctacctgctgtccaagaacaatgccattgagcccaggtccttctcccagaacagcagacacccctccaccaggcagaagcagttcaatgcaaccaccatccctgaaaataccaccctgcagagtgaccaggaggagattgactatgatgacaccatctctgtggagatgaagaaggaggactttgacatctatgatgaggatgagaaccagagccctagaagcttccagaagaagaccagacactacttcattgctgcagtggaaagactgtgggactatgggatgagctcctccccccatgtgctgaggaacagggcccagtctggctctgtgccccagttcaagaaggtggtgttccaggagttcactgatggctccttcacccagcccctgtacaggggagagctgaatgagcacctgggcctgctgggcccctacatcagggctgaggtggaggacaatatcatggtgaccttcagaaaccaggcctccagaccttactccttctacagcagcctgatctcctatgaggaggaccagagacagggggctgagcccaggaagaactttgtgaagcccaatgagaccaagacctacttctggaaggtgcagcaccacatggcccccaccaaggatgagtttgactgcaaggcctgggcctacttctctgatgtggacctggagaaggatgtgcactctggcctgattggccccctgctggtgtgccacaccaacaccctgaaccctgcccatggcaggcaggtgactgtgcaggagtttgccctgttcttcaccatctttgatgagaccaagagctggtacttcactgagaacatggagaggaactgcagggccccctgcaacatccagatggaggaccccaccttcaaggagaactacaggttccatgccatcaatggctacatcatggacaccctgcctggcctggtgatggcccaggaccagaggatcaggtggtacctgctgagcatggggagcaatgagaacatccacagcatccacttctctggccatgtgttcacagtgaggaagaaggaggagtacaagatggccctgtacaacctgtaccctggggtgtttgagacagtggagatgctgccctccaaggctggaatctggagggtggagtgcctgattggggagcacctgcatgctggcatgagcaccctgttcctggtgtacagcaacaagtgccagacccccctgggcatggcctctggccacatcagagacttccagatcacagcctcaggccagtatggccagtgggcccccaagctggccaggctgcactactctggcagcatcaatgcctggtccaccaaggagcccttcagctggatcaaggtggacctcctggcccccatgatcatccatggcatcaagacccagggggccaggcagaagttcagctccctgtacatctcccagttcatcatcatgtactccctggatggcaagaagtggcagacctacagaggcaacagcacaggcaccctgatggtgttctttggcaatgtggacagctctgggatcaagcacaacatcttcaacccccccatcattgccaggtacatcagactgcaccccacccactactccatcaggtccaccctgagaatggagctgatgggctgtgacctgaacagctgcagcatgcccctgggcatggagagcaaggccatctctgatgcccagatcacagccagcagctacttcaccaacatgtttgccacctggtcccccagcaaggccaggctgcacctgcagggcaggagcaatgcctggaggccccaggtgaacaaccccaaggagtggctgcaggtggacttccagaagaccatgaaggtgacaggggtgaccacccagggggtgaagtccctgctgaccagcatgtatgtgaaggagttcctgatcagcagctcccaggatggccaccagtggaccctgttcttccagaatggcaaggtgaaggtgttccagggcaaccaggacagcttcacccctgtggtgaactccctggacccccccctgctgaccagatacctgaggatccacccccagtcctgggtgcaccagattgccctgagaatggaggtgctgggctgtgaggcccaggacctgtactga

SEQ ID NO: 99 - DNA, 4909 bp, Artificial Sequence
  Description of Artificial Sequence: Synthetic polynucleotide
atgcaaattgagttatccacctgtttcttcctctgtctcctgaggttctgcttctctgccaccaggagatactacctgggggctgtggagctgtcctgggactacatgcagtcagacctgggggagctgccagttgatgccaggtaaaggcatgtcctgtagggtctgatcggggccaggattgtggggatgtaagtctgcttggaggaaggtgcagacatcgggttaggatggttgtgatgctacctgggccccaaagaaacatttctgggtaaggtgtgcacacatctgtgttattagcagaaatgctaactgccaattcttttcataggtctgacctattccctaaaatgggcaaacattgcaagcagcaaacagcaaacacacagccctccctgcctgctgaccttggagctggggcagaggtcagagacctctctgggcccatgccacctccaactatgattcttatcatatggcacctaatgtatcagttgagttgtgaaaacagtgtttcggtttaatggatgttagggatttatatacaacttcaaatttgcctccttgctaatagtagaaaagagtagtatggaagcattacttccagctgctttttgaagtgtccaccaaaatgaacgactttttcctttcttcacgcaggttcccccccagagtccccaagtccttccccttcaacacctcagtggtgtacaaaaagaccctgtttgtggagttcacagaccacctgttcaacatagccaagcccaggcccccctggatgggcctgctgggccccaccatccaggcagaggtttatgacacagtggtcatcaccctgaagaacatggcctcccaccctgtgtccctccatgctgtgggggtgagctactggaaggccagtgagggggcagaatatgatgaccagaccagccagagggagaaggaggatgacaaggtgttcccagggggcagccacacctatgtgtggcaggtcctgaaggagaatggccccatggcctctgaccccctctgcctcacctactcctacctgtcccatgtggacctggtgaaggacctcaactctggcctgattggagccctcctggtgtgcagggaggggagcctggccaaggaaaagacccagaccctgcacaagtttatcctgctctttgcagtctttgatgaggggaagtcctggcacagtgagaccaagaactccctgatgcaggacagagatgctgcctcagccagggcctggcccaagatgcacacagtgaatgggtatgtcaacaggagcctgccaggcctgattgggtgccacagaaagtcagtgtactggcatgtcattggcatgggcaccaccccagaggtgcactccatcttcctggagggccacaccttcctggtgaggaaccacagacaggccagcctggagatcagcccaatcaccttcctcacagcccagaccctcctcatggacctgggccagtttctcctgagctgccacatctcctcccaccagcatgatggcatggaggcctatgtgaaggtggacagctgccctgaggagccccagctcaggatgaagaacaatgaggaggcagaggactatgatgatgatctgacagactctgagatggatgtggtgagatttgatgatgacaacagcccctccttcatccagatcaggtctgtggccaagaagcaccctaagacctgggtgcactacattgcagctgaggaggaggactgggactatgcccccctggtcctggcccctgatgataggtcctacaagtcccagtacctgaacaatggcccccagaggatagggagaaagtacaagaaggtgaggttcatggcctacactgatgagaccttcaagactagggaagccatccagcatgagtctgggatcctgggccccctcctctatggggaggtgggggacaccctgctgatcatcttcaagaaccaggccagcaggccctacaacatttacccccatgggatcacagatgtgagacccctgtacagcaggagactgccaaagggggtgaagcacctgaaggacttccccatcctgccaggggagatcttcaagtacaagtggactgtgacagtggaggatgggcccaccaaatctgaccctagatgcctgaccagatactacagcagctttgtgaacatggagagggacctggcctctggactgattggccctctgctgatctgctacaaggagagtgtggaccagaggggaaaccagatcatgtctgacaagaggaatgtgatcctgttctcagtgtttgatgagaacagatcctggtacctcactgagaacatccagaggttcctgcccaacccagcaggggtgcagctggaggacccagagttccaggcctccaacatcatgcactccatcaatggctatgtctttgactccctgcagctgtcagtgtgcctgcatgaggtggcctactggtacatcctctccattggagcccagactgacttcctgtcagtcttcttcagtggctacaccttcaagcacaagatggtctatgaggacactctgaccctgttccccttctctggggagactgtgttcatgtccatggagaaccctggactgtggatcctgggctgccacaacagtgacttcaggaacaggggcatgactgccctgctgaaggtctccagctgtgacaagaacactggggactactatgaggactcctatgaggacatctctgcctacctgctgtccaagaacaatgccattgagcccaggtccttctcccagaacagcagacacccctccaccaggcagaagcagttcaatgcaaccaccatccctgaaaataccaccctgcagagtgaccaggaggagattgactatgatgacaccatctctgtggagatgaagaaggaggactttgacatctatgatgaggatgagaaccagagccctagaagcttccagaagaagaccagacactacttcattgctgcagtggaaagactgtgggactatgggatgagctcctccccccatgtgctgaggaacagggcccagtctggctctgtgccccagttcaagaaggtggtgttccaggagttcactgatggctccttcacccagcccctgtacaggggagagctgaatgagcacctgggcctgctgggcccctacatcagggctgaggtggaggacaatatcatggtgaccttcagaaaccaggcctccagaccttactccttctacagcagcctgatctcctatgaggaggaccagagacagggggctgagcccaggaagaactttgtgaagcccaatgagaccaagacctacttctggaaggtgcagcaccacatggcccccaccaaggatgagtttgactgcaaggcctgggcctacttctctgatgtggacctggagaaggatgtgcactctggcctgattggccccctgctggtgtgccacaccaacaccctgaaccctgcccatggcaggcaggtgactgtgcaggagtttgccctgttcttcaccatctttgatgagaccaagagctggtacttcactgagaacatggagaggaactgcagggccccctgcaacatccagatggaggaccccaccttcaaggagaactacaggttccatgccatcaatggctacatcatggacaccctgcctggcctggtgatggcccaggaccagaggatcaggtggtacctgctgagcatggggagcaatgagaacatccacagcatccacttctctggccatgtgttcacagtgaggaagaaggaggagtacaagatggccctgtacaacctgtaccctggggtgtttgagacagtggagatgctgccctccaaggctggaatctggagggtggagtgcctgattggggagcacctgcatgctggcatgagcaccctgttcctggtgtacagcaacaagtgccagacccccctgggcatggcctctggccacatcagagacttccagatcacagcctcaggccagtatggccagtgggcccccaagctggccaggctgcactactctggcagcatcaatgcctggtccaccaaggagcccttcagctggatcaaggtggacctcctggcccccatgatcatccatggcatcaagacccagggggccaggcagaagttcagctccctgtacatctcccagttcatcatcatgtactccctggatggcaagaagtggcagacctacagaggcaacagcacaggcaccctgatggtgttctttggcaatgtggacagctctgggatcaagcacaacatcttcaacccccccatcattgccaggtacatcagactgcaccccacccactactccatcaggtccaccctgagaatggagctgatgggctgtgacctgaacagctgcagcatgcccctgggcatggagagcaaggccatctctgatgcccagatcacagccagcagctacttcaccaacatgtttgccacctggtcccccagcaaggccaggctgcacctgcagggcaggagcaatgcctggaggccccaggtgaacaaccccaaggagtggctgcaggtggacttccagaagaccatgaaggtgacaggggtgaccacccagggggtgaagtccctgctgaccagcatgtatgtgaaggagttcctgatcagcagctcccaggatggccaccagtggaccctgttcttccagaatggcaaggtgaaggtgttccagggcaaccaggacagcttcacccctgtggtgaactccctggacccccccctgctgaccagatacctgaggatccacccccagtcctgggtgcaccagattgccctgagaatggaggtgctgggctgtgaggcccaggacctgtactga

SEQ ID NO: 100 - DNA, 4912 bp, Artificial Sequence
  Description of Artificial Sequence: Synthetic polynucleotide
atgcaaattgagttatccacctgtttcttcctctgtctcctgaggttctgcttctctgccaccaggagatactacctgggggctgtggagctgtcctgggactacatgcagtcagacctgggggagctgccagttgatgccaggtaaaggcatgtcctgtagggtctgatcggggccaggattgtggggatgtaagtctgcttggaggaaggtgcagacatcgggttaggatggttgtgatgctacctgggccccaaagaaacatttctgggtaaggtgtgcacacatctgtgttattagcagaaatgctaactgccaattcttttcataggtctgacctattgcgagaacttgtgcctccccgtgttcctgctctttgtccctctgtcctacttagactaatatttgccttgggtactgcaaacaggaaatgggggagggacaggagtagggcggagggtagtatgattcttatcatatggcacctaatgtatcagttgagttgtgaaaacagtgtttcggtttaatggatgttagggatttatatacaacttcaaatttgcctccttgctaatagtagaaaagagtagtatggaagcattacttccagctgctttttgaagtgtccaccaaaatgaacgactttttcctttcttcacgcaggttcccccccagagtccccaagtccttccccttcaacacctcagtggtgtacaaaaagaccctgtttgtggagttcacagaccacctgttcaacatagccaagcccaggcccccctggatgggcctgctgggccccaccatccaggcagaggtttatgacacagtggtcatcaccctgaagaacatggcctcccaccctgtgtccctccatgctgtgggggtgagctactggaaggccagtgagggggcagaatatgatgaccagaccagccagagggagaaggaggatgacaaggtgttcccagggggcagccacacctatgtgtggcaggtcctgaaggagaatggccccatggcctctgaccccctctgcctcacctactcctacctgtcccatgtggacctggtgaaggacctcaactctggcctgattggagccctcctggtgtgcagggaggggagcctggccaaggaaaagacccagaccctgcacaagtttatcctgctctttgcagtctttgatgaggggaagtcctggcacagtgagaccaagaactccctgatgcaggacagagatgctgcctcagccagggcctggcccaagatgcacacagtgaatgggtatgtcaacaggagcctgccaggcctgattgggtgccacagaaagtcagtgtactggcatgtcattggcatgggcaccaccccagaggtgcactccatcttcctggagggccacaccttcctggtgaggaaccacagacaggccagcctggagatcagcccaatcaccttcctcacagcccagaccctcctcatggacctgggccagtttctcctgagctgccacatctcctcccaccagcatgatggcatggaggcctatgtgaaggtggacagctgccctgaggagccccagctcaggatgaagaacaatgaggaggcagaggactatgatgatgatctgacagactctgagatggatgtggtgagatttgatgatgacaacagcccctccttcatccagatcaggtctgtggccaagaagcaccctaagacctgggtgcactacattgcagctgaggaggaggactgggactatgcccccctggtcctggcccctgatgataggtcctacaagtcccagtacctgaacaatggcccccagaggatagggagaaagtacaagaaggtgaggttcatggcctacactgatgagaccttcaagactagggaagccatccagcatgagtctgggatcctgggccccctcctctatggggaggtgggggacaccctgctgatcatcttcaagaaccaggccagcaggccctacaacatttacccccatgggatcacagatgtgagacccctgtacagcaggagactgccaaagggggtgaagcacctgaaggacttccccatcctgccaggggagatcttcaagtacaagtggactgtgacagtggaggatgggcccaccaaatctgaccctagatgcctgaccagatactacagcagctttgtgaacatggagagggacctggcctctggactgattggccctctgctgatctgctacaaggagagtgtggaccagaggggaaaccagatcatgtctgacaagaggaatgtgatcctgttctcagtgtttgatgagaacagatcctggtacctcactgagaacatccagaggttcctgcccaacccagcaggggtgcagctggaggacccagagttccaggcctccaacatcatgcactccatcaatggctatgtctttgactccctgcagctgtcagtgtgcctgcatgaggtggcctactggtacatcctctccattggagcccagactgacttcctgtcagtcttcttcagtggctacaccttcaagcacaagatggtctatgaggacactctgaccctgttccccttctctggggagactgtgttcatgtccatggagaaccctggactgtggatcctgggctgccacaacagtgacttcaggaacaggggcatgactgccctgctgaaggtctccagctgtgacaagaacactggggactactatgaggactcctatgaggacatctctgcctacctgctgtccaagaacaatgccattgagcccaggtccttctcccagaacagcagacacccctccaccaggcagaagcagttcaatgcaaccaccatccctgaaaataccaccctgcagagtgaccaggaggagattgactatgatgacaccatctctgtggagatgaagaaggaggactttgacatctatgatgaggatgagaaccagagccctagaagcttccagaagaagaccagacactacttcattgctgcagtggaaagactgtgggactatgggatgagctcctccccccatgtgctgaggaacagggcccagtctggctctgtgccccagttcaagaaggtggtgttccaggagttcactgatggctccttcacccagcccctgtacaggggagagctgaatgagcacctgggcctgctgggcccctacatcagggctgaggtggaggacaatatcatggtgaccttcagaaaccaggcctccagaccttactccttctacagcagcctgatctcctatgaggaggaccagagacagggggctgagcccaggaagaactttgtgaagcccaatgagaccaagacctacttctggaaggtgcagcaccacatggcccccaccaaggatgagtttgactgcaaggcctgggcctacttctctgatgtggacctggagaaggatgtgcactctggcctgattggccccctgctggtgtgccacaccaacaccctgaaccctgcccatggcaggcaggtgactgtgcaggagtttgccctgttcttcaccatctttgatgagaccaagagctggtacttcactgagaacatggagaggaactgcagggccccctgcaacatccagatggaggaccccaccttcaaggagaactacaggttccatgccatcaatggctacatcatggacaccctgcctggcctggtgatggcccaggaccagaggatcaggtggtacctgctgagcatggggagcaatgagaacatccacagcatccacttctctggccatgtgttcacagtgaggaagaaggaggagtacaagatggccctgtacaacctgtaccctggggtgtttgagacagtggagatgctgccctccaaggctggaatctggagggtggagtgcctgattggggagcacctgcatgctggcatgagcaccctgttcctggtgtacagcaacaagtgccagacccccctgggcatggcctctggccacatcagagacttccagatcacagcctcaggccagtatggccagtgggcccccaagctggccaggctgcactactctggcagcatcaatgcctggtccaccaaggagcccttcagctggatcaaggtggacctcctggcccccatgatcatccatggcatcaagacccagggggccaggcagaagttcagctccctgtacatctcccagttcatcatcatgtactccctggatggcaagaagtggcagacctacagaggcaacagcacaggcaccctgatggtgttctttggcaatgtggacagctctgggatcaagcacaacatcttcaacccccccatcattgccaggtacatcagactgcaccccacccactactccatcaggtccaccctgagaatggagctgatgggctgtgacctgaacagctgcagcatgcccctgggcatggagagcaaggccatctctgatgcccagatcacagccagcagctacttcaccaacatgtttgccacctggtcccccagcaaggccaggctgcacctgcagggcaggagcaatgcctggaggccccaggtgaacaaccccaaggagtggctgcaggtggacttccagaagaccatgaaggtgacaggggtgaccacccagggggtgaagtccctgctgaccagcatgtatgtgaaggagttcctgatcagcagctcccaggatggccaccagtggaccctgttcttccagaatggcaaggtgaaggtgttccagggcaaccaggacagcttcacccctgtggtgaactccctggacccccccctgctgaccagatacctgaggatccacccccagtcctgggtgcaccagattgccctgagaatggaggtgctgggctgtgaggcccaggacctgtactga

SEQ ID NO: 101 - DNA, 4882 bp, Artificial Sequence
  Description of Artificial Sequence: Synthetic polynucleotide
atgcaaattgagttatccacctgtttcttcctctgtctcctgaggttctgcttctctgccaccaggagatactacctgggggctgtggagctgtcctgggactacatgcagtcagacctgggggagctgccagttgatgccaggtaaaggcatgtcctgtagggtctgatcggggccaggattgtggggatgtaagtctgcttggaggaaggtgcagacatcgggttaggatggttgtgatgctacctgggccccaaagaaacatttctgggtaaggtgtgcacacatctgtgttattagcagaaatgctaactgccaattcttttcataggtctgacctattgttaatcattaacgcttgtactttggtacagttaatcattaacgcttgtactttggtacagttaatcattaacgcttgtactttggtacatatgattcttatcatatggcacctaatgtatcagttgagttgtgaaaacagtgtttcggtttaatggatgttagggatttatatacaacttcaaatttgcctccttgctaatagtagaaaagagtagtatggaagcattacttccagctgctttttgaagtgtccaccaaaatgaacgactttttcctttcttcacgcaggttcccccccagagtccccaagtccttccccttcaacacctcagtggtgtacaaaaagaccctgtttgtggagttcacagaccacctgttcaacatagccaagcccaggcccccctggatgggcctgctgggccccaccatccaggcagaggtttatgacacagtggtcatcaccctgaagaacatggcctcccaccctgtgtccctccatgctgtgggggtgagctactggaaggccagtgagggggcagaatatgatgaccagaccagccagagggagaaggaggatgacaaggtgttcccagggggcagccacacctatgtgtggcaggtcctgaaggagaatggccccatggcctctgaccccctctgcctcacctactcctacctgtcccatgtggacctggtgaaggacctcaactctggcctgattggagccctcctggtgtgcagggaggggagcctggccaaggaaaagacccagaccctgcacaagtttatcctgctctttgcagtctttgatgaggggaagtcctggcacagtgagaccaagaactccctgatgcaggacagagatgctgcctcagccagggcctggcccaagatgcacacagtgaatgggtatgtcaacaggagcctgccaggcctgattgggtgccacagaaagtcagtgtactggcatgtcattggcatgggcaccaccccagaggtgcactccatcttcctggagggccacaccttcctggtgaggaaccacagacaggccagcctggagatcagcccaatcaccttcctcacagcccagaccctcctcatggacctgggccagtttctcctgagctgccacatctcctcccaccagcatgatggcatggaggcctatgtgaaggtggacagctgccctgaggagccccagctcaggatgaagaacaatgaggaggcagaggactatgatgatgatctgacagactctgagatggatgtggtgagatttgatgatgacaacagcccctccttcatccagatcaggtctgtggccaagaagcaccctaagacctgggtgcactacattgcagctgaggaggaggactgggactatgcccccctggtcctggcccctgatgataggtcctacaagtcccagtacctgaacaatggcccccagaggatagggagaaagtacaagaaggtgaggttcatggcctacactgatgagaccttcaagactagggaagccatccagcatgagtctgggatcctgggccccctcctctatggggaggtgggggacaccctgctgatcatcttcaagaaccaggccagcaggccctacaacatttacccccatgggatcacagatgtgagacccctgtacagcaggagactgccaaagggggtgaagcacctgaaggacttccccatcctgccaggggagatcttcaagtacaagtggactgtgacagtggaggatgggcccaccaaatctgaccctagatgcctgaccagatactacagcagctttgtgaacatggagagggacctggcctctggactgattggccctctgctgatctgctacaaggagagtgtggaccagaggggaaaccagatcatgtctgacaagaggaatgtgatcctgttctcagtgtttgatgagaacagatcctggtacctcactgagaacatccagaggttcctgcccaacccagcaggggtgcagctggaggacccagagttccaggcctccaacatcatgcactccatcaatggctatgtctttgactccctgcagctgtcagtgtgcctgcatgaggtggcctactggtacatcctctccattggagcccagactgacttcctgtcagtcttcttcagtggctacaccttcaagcacaagatggtctatgaggacactctgaccctgttccccttctctggggagactgtgttcatgtccatggagaaccctggactgtggatcctgggctgccacaacagtgacttcaggaacaggggcatgactgccctgctgaaggtctccagctgtgacaagaacactggggactactatgaggactcctatgaggacatctctgcctacctgctgtccaagaacaatgccattgagcccaggtccttctcccagaacagcagacacccctccaccaggcagaagcagttcaatgcaaccaccatccctgaaaataccaccctgcagagtgaccaggaggagattgactatgatgacaccatctctgtggagatgaagaaggaggactttgacatctatgatgaggatgagaaccagagccctagaagcttccagaagaagaccagacactacttcattgctgcagtggaaagactgtgggactatgggatgagctcctccccccatgtgctgaggaacagggcccagtctggctctgtgccccagttcaagaaggtggtgttccaggagttcactgatggctccttcacccagcccctgtacaggggagagctgaatgagcacctgggcctgctgggcccctacatcagggctgaggtggaggacaatatcatggtgaccttcagaaaccaggcctccagaccttactccttctacagcagcctgatctcctatgaggaggaccagagacagggggctgagcccaggaagaactttgtgaagcccaatgagaccaagacctacttctggaaggtgcagcaccacatggcccccaccaaggatgagtttgactgcaaggcctgggcctacttctctgatgtggacctggagaaggatgtgcactctggcctgattggccccctgctggtgtgccacaccaacaccctgaaccctgcccatggcaggcaggtgactgtgcaggagtttgccctgttcttcaccatctttgatgagaccaagagctggtacttcactgagaacatggagaggaactgcagggccccctgcaacatccagatggaggaccccaccttcaaggagaactacaggttccatgccatcaatggctacatcatggacaccctgcctggcctggtgatggcccaggaccagaggatcaggtggtacctgctgagcatggggagcaatgagaacatccacagcatccacttctctggccatgtgttcacagtgaggaagaaggaggagtacaagatggccctgtacaacctgtaccctggggtgtttgagacagtggagatgctgccctccaaggctggaatctggagggtggagtgcctgattggggagcacctgcatgctggcatgagcaccctgttcctggtgtacagcaacaagtgccagacccccctgggcatggcctctggccacatcagagacttccagatcacagcctcaggccagtatggccagtgggcccccaagctggccaggctgcactactctggcagcatcaatgcctggtccaccaaggagcccttcagctggatcaaggtggacctcctggcccccatgatcatccatggcatcaagacccagggggccaggcagaagttcagctccctgtacatctcccagttcatcatcatgtactccctggatggcaagaagtggcagacctacagaggcaacagcacaggcaccctgatggtgttctttggcaatgtggacagctctgggatcaagcacaacatcttcaacccccccatcattgccaggtacatcagactgcaccccacccactactccatcaggtccaccctgagaatggagctgatgggctgtgacctgaacagctgcagcatgcccctgggcatggagagcaaggccatctctgatgcccagatcacagccagcagctacttcaccaacatgtttgccacctggtcccccagcaaggccaggctgcacctgcagggcaggagcaatgcctggaggccccaggtgaacaaccccaaggagtggctgcaggtggacttccagaagaccatgaaggtgacaggggtgaccacccagggggtgaagtccctgctgaccagcatgtatgtgaaggagttcctgatcagcagctcccaggatggccaccagtggaccctgttcttccagaatggcaaggtgaaggtgttccagggcaaccaggacagcttcacccctgtggtgaactccctggacccccccctgctgaccagatacctgaggatccacccccagtcctgggtgcaccagattgccctgagaatggaggtgctgggctgtgaggcccaggacctgtactga

SEQ ID NO: 102 - DNA, 4676 bp, Artificial Sequence
  Description of Artificial Sequence: Synthetic polynucleotide
atgcaaattgagttatccacctgtttcttcctctgtctcctgaggttctgcttctctgccaccaggagatactacctgggggctgtggagctgtcctgggactacatgcagtcagacctgggggagctgccagttgatgccaggtaagcactttttgactattggtactctctcttccccatactcaaaaagttcttaccagttattcaaaccaacaaatcctgaagccatgtttaaggttaggtacaggtatggaatcaaatggcaagggtattaacatttggaaactaacatagctgagcatcagagaagcttgtatttttctcactccttgccttgattgaatcatataagctgttttagagttggatttgagcctacctagaatttttcttcccaacctctcatctttttttctcttatacaggttcccccccagagtccccaagtccttccccttcaacacctcagtggtgtacaaaaagaccctgtttgtggagttcacagaccacctgttcaacatagccaagcccaggcccccctggatgggcctgctgggccccaccatccaggcagaggtttatgacacagtggtcatcaccctgaagaacatggcctcccaccctgtgtccctccatgctgtgggggtgagctactggaaggccagtgagggggcagaatatgatgaccagaccagccagagggagaaggaggatgacaaggtgttcccagggggcagccacacctatgtgtggcaggtcctgaaggagaatggccccatggcctctgaccccctctgcctcacctactcctacctgtcccatgtggacctggtgaaggacctcaactctggcctgattggagccctcctggtgtgcagggaggggagcctggccaaggaaaagacccagaccctgcacaagtttatcctgctctttgcagtctttgatgaggggaagtcctggcacagtgagaccaagaactccctgatgcaggacagagatgctgcctcagccagggcctggcccaagatgcacacagtgaatgggtatgtcaacaggagcctgccaggcctgattgggtgccacagaaagtcagtgtactggcatgtcattggcatgggcaccaccccagaggtgcactccatcttcctggagggccacaccttcctggtgaggaaccacagacaggccagcctggagatcagcccaatcaccttcctcacagcccagaccctcctcatggacctgggccagtttctcctgagctgccacatctcctcccaccagcatgatggcatggaggcctatgtgaaggtggacagctgccctgaggagccccagctcaggatgaagaacaatgaggaggcagaggactatgatgatgatctgacagactctgagatggatgtggtgagatttgatgatgacaacagcccctccttcatccagatcaggtctgtggccaagaagcaccctaagacctgggtgcactacattgcagctgaggaggaggactgggactatgcccccctggtcctggcccctgatgataggtcctacaagtcccagtacctgaacaatggcccccagaggatagggagaaagtacaagaaggtgaggttcatggcctacactgatgagaccttcaagactagggaagccatccagcatgagtctgggatcctgggccccctcctctatggggaggtgggggacaccctgctgatcatcttcaagaaccaggccagcaggccctacaacatttacccccatgggatcacagatgtgagacccctgtacagcaggagactgccaaagggggtgaagcacctgaaggacttccccatcctgccaggggagatcttcaagtacaagtggactgtgacagtggaggatgggcccaccaaatctgaccctagatgcctgaccagatactacagcagctttgtgaacatggagagggacctggcctctggactgattggccctctgctgatctgctacaaggagagtgtggaccagaggggaaaccagatcatgtctgacaagaggaatgtgatcctgttctcagtgtttgatgagaacagatcctggtacctcactgagaacatccagaggttcctgcccaacccagcaggggtgcagctggaggacccagagttccaggcctccaacatcatgcactccatcaatggctatgtctttgactccctgcagctgtcagtgtgcctgcatgaggtggcctactggtacatcctctccattggagcccagactgacttcctgtcagtcttcttcagtggctacaccttcaagcacaagatggtctatgaggacactctgaccctgttccccttctctggggagactgtgttcatgtccatggagaaccctggactgtggatcctgggctgccacaacagtgacttcaggaacaggggcatgactgccctgctgaaggtctccagctgtgacaagaacactggggactactatgaggactcctatgaggacatctctgcctacctgctgtccaagaacaatgccattgagcccaggtccttctcccagaacagcagacacccctccaccaggcagaagcagttcaatgcaaccaccatccctgaaaataccaccctgcagagtgaccaggaggagattgactatgatgacaccatctctgtggagatgaagaaggaggactttgacatctatgatgaggatgagaaccagagccctagaagcttccagaagaagaccagacactacttcattgctgcagtggaaagactgtgggactatgggatgagctcctccccccatgtgctgaggaacagggcccagtctggctctgtgccccagttcaagaaggtggtgttccaggagttcactgatggctccttcacccagcccctgtacaggggagagctgaatgagcacctgggcctgctgggcccctacatcagggctgaggtggaggacaatatcatggtgaccttcagaaaccaggcctccagaccttactccttctacagcagcctgatctcctatgaggaggaccagagacagggggctgagcccaggaagaactttgtgaagcccaatgagaccaagacctacttctggaaggtgcagcaccacatggcccccaccaaggatgagtttgactgcaaggcctgggcctacttctctgatgtggacctggagaaggatgtgcactctggcctgattggccccctgctggtgtgccacaccaacaccctgaaccctgcccatggcaggcaggtgactgtgcaggagtttgccctgttcttcaccatctttgatgagaccaagagctggtacttcactgagaacatggagaggaactgcagggccccctgcaacatccagatggaggaccccaccttcaaggagaactacaggttccatgccatcaatggctacatcatggacaccctgcctggcctggtgatggcccaggaccagaggatcaggtggtacctgctgagcatggggagcaatgagaacatccacagcatccacttctctggccatgtgttcacagtgaggaagaaggaggagtacaagatggccctgtacaacctgtaccctggggtgtttgagacagtggagatgctgccctccaaggctggaatctggagggtggagtgcctgattggggagcacctgcatgctggcatgagcaccctgttcctggtgtacagcaacaagtgccagacccccctgggcatggcctctggccacatcagagacttccagatcacagcctcaggccagtatggccagtgggcccccaagctggccaggctgcactactctggcagcatcaatgcctggtccaccaaggagcccttcagctggatcaaggtggacctcctggcccccatgatcatccatggcatcaagacccagggggccaggcagaagttcagctccctgtacatctcccagttcatcatcatgtactccctggatggcaagaagtggcagacctacagaggcaacagcacaggcaccctgatggtgttctttggcaatgtggacagctctgggatcaagcacaacatcttcaacccccccatcattgccaggtacatcagactgcaccccacccactactccatcaggtccaccctgagaatggagctgatgggctgtgacctgaacagctgcagcatgcccctgggcatggagagcaaggccatctctgatgcccagatcacagccagcagctacttcaccaacatgtttgccacctggtcccccagcaaggccaggctgcacctgcagggcaggagcaatgcctggaggccccaggtgaacaaccccaaggagtggctgcaggtggacttccagaagaccatgaaggtgacaggggtgaccacccagggggtgaagtccctgctgaccagcatgtatgtgaaggagttcctgatcagcagctcccaggatggccaccagtggaccctgttcttccagaatggcaaggtgaaggtgttccagggcaaccaggacagcttcacccctgtggtgaactccctggacccccccctgctgaccagatacctgaggatccacccccagtcctgggtgcaccagattgccctgagaatggaggtgctgggctgtgaggcccaggacctgtactga

SEQ ID NO: 103 - DNA, 4678 bp, Artificial Sequence
  Description of Artificial Sequence: Synthetic polynucleotide
atgcaaattgagttatccacctgtttcttcctctgtctcctgaggttctgcttctctgccaccaggagatactacctgggggctgtggagctgtcctgggactacatgcagtcagacctgggggagctgccagttgatgccaggtaagcaggtgtctattgtgctgaccactttttggtttaaaagaaatggtctttgtgtactaagaattttgatatttatcctacgtgcaataagaagctttaaataggagagttgatcattatatttgtgttttagaaatgtcattctggaatctactgaagaggatggattatatttttggaaggtgggaggcaggttggactggcataaaaattgatgagaaatccactctggttcataggtgagagagcttatactcataggattgatgtcttccctccctaggttcccccccagagtccccaagtccttccccttcaacacctcagtggtgtacaaaaagaccctgtttgtggagttcacagaccacctgttcaacatagccaagcccaggcccccctggatgggcctgctgggccccaccatccaggcagaggtttatgacacagtggtcatcaccctgaagaacatggcctcccaccctgtgtccctccatgctgtgggggtgagctactggaaggccagtgagggggcagaatatgatgaccagaccagccagagggagaaggaggatgacaaggtgttcccagggggcagccacacctatgtgtggcaggtcctgaaggagaatggccccatggcctctgaccccctctgcctcacctactcctacctgtcccatgtggacctggtgaaggacctcaactctggcctgattggagccctcctggtgtgcagggaggggagcctggccaaggaaaagacccagaccctgcacaagtttatcctgctctttgcagtctttgatgaggggaagtcctggcacagtgagaccaagaactccctgatgcaggacagagatgctgcctcagccagggcctggcccaagatgcacacagtgaatgggtatgtcaacaggagcctgccaggcctgattgggtgccacagaaagtcagtgtactggcatgtcattggcatgggcaccaccccagaggtgcactccatcttcctggagggccacaccttcctggtgaggaaccacagacaggccagcctggagatcagcccaatcaccttcctcacagcccagaccctcctcatggacctgggccagtttctcctgagctgccacatctcctcccaccagcatgatggcatggaggcctatgtgaaggtggacagctgccctgaggagccccagctcaggatgaagaacaatgaggaggcagaggactatgatgatgatctgacagactctgagatggatgtggtgagatttgatgatgacaacagcccctccttcatccagatcaggtctgtggccaagaagcaccctaagacctgggtgcactacattgcagctgaggaggaggactgggactatgcccccctggtcctggcccctgatgataggtcctacaagtcccagtacctgaacaatggcccccagaggatagggagaaagtacaagaaggtgaggttcatggcctacactgatgagaccttcaagactagggaagccatccagcatgagtctgggatcctgggccccctcctctatggggaggtgggggacaccctgctgatcatcttcaagaaccaggccagcaggccctacaacatttacccccatgggatcacagatgtgagacccctgtacagcaggagactgccaaagggggtgaagcacctgaaggacttccccatcctgccaggggagatcttcaagtacaagtggactgtgacagtggaggatgggcccaccaaatctgaccctagatgcctgaccagatactacagcagctttgtgaacatggagagggacctggcctctggactgattggccctctgctgatctgctacaaggagagtgtggaccagaggggaaaccagatcatgtctgacaagaggaatgtgatcctgttctcagtgtttgatgagaacagatcctggtacctcactgagaacatccagaggttcctgcccaacccagcaggggtgcagctggaggacccagagttccaggcctccaacatcatgcactccatcaatggctatgtctttgactccctgcagctgtcagtgtgcctgcatgaggtggcctactggtacatcctctccattggagcccagactgacttcctgtcagtcttcttcagtggctacaccttcaagcacaagatggtctatgaggacactctgaccctgttccccttctctggggagactgtgttcatgtccatggagaaccctggactgtggatcctgggctgccacaacagtgacttcaggaacaggggcatgactgccctgctgaaggtctccagctgtgacaagaacactggggactactatgaggactcctatgaggacatctctgcctacctgctgtccaagaacaatgccattgagcccaggtccttctcccagaacagcagacacccctccaccaggcagaagcagttcaatgcaaccaccatccctgaaaataccaccctgcagagtgaccaggaggagattgactatgatgacaccatctctgtggagatgaagaaggaggactttgacatctatgatgaggatgagaaccagagccctagaagcttccagaagaagaccagacactacttcattgctgcagtggaaagactgtgggactatgggatgagctcctccccccatgtgctgaggaacagggcccagtctggctctgtgccccagttcaagaaggtggtgttccaggagttcactgatggctccttcacccagcccctgtacaggggagagctgaatgagcacctgggcctgctgggcccctacatcagggctgaggtggaggacaatatcatggtgaccttcagaaaccaggcctccagaccttactccttctacagcagcctgatctcctatgaggaggaccagagacagggggctgagcccaggaagaactttgtgaagcccaatgagaccaagacctacttctggaaggtgcagcaccacatggcccccaccaaggatgagtttgactgcaaggcctgggcctacttctctgatgtggacctggagaaggatgtgcactctggcctgattggccccctgctggtgtgccacaccaacaccctgaaccctgcccatggcaggcaggtgactgtgcaggagtttgccctgttcttcaccatctttgatgagaccaagagctggtacttcactgagaacatggagaggaactgcagggccccctgcaacatccagatggaggaccccaccttcaaggagaactacaggttccatgccatcaatggctacatcatggacaccctgcctggcctggtgatggcccaggaccagaggatcaggtggtacctgctgagcatggggagcaatgagaacatccacagcatccacttctctggccatgtgttcacagtgaggaagaaggaggagtacaagatggccctgtacaacctgtaccctggggtgtttgagacagtggagatgctgccctccaaggctggaatctggagggtggagtgcctgattggggagcacctgcatgctggcatgagcaccctgttcctggtgtacagcaacaagtgccagacccccctgggcatggcctctggccacatcagagacttccagatcacagcctcaggccagtatggccagtgggcccccaagctggccaggctgcactactctggcagcatcaatgcctggtccaccaaggagcccttcagctggatcaaggtggacctcctggcccccatgatcatccatggcatcaagacccagggggccaggcagaagttcagctccctgtacatctcccagttcatcatcatgtactccctggatggcaagaagtggcagacctacagaggcaacagcacaggcaccctgatggtgttctttggcaatgtggacagctctgggatcaagcacaacatcttcaacccccccatcattgccaggtacatcagactgcaccccacccactactccatcaggtccaccctgagaatggagctgatgggctgtgacctgaacagctgcagcatgcccctgggcatggagagcaaggccatctctgatgcccagatcacagccagcagctacttcaccaacatgtttgccacctggtcccccagcaaggccaggctgcacctgcagggcaggagcaatgcctggaggccccaggtgaacaaccccaaggagtggctgcaggtggacttccagaagaccatgaaggtgacaggggtgaccacccagggggtgaagtccctgctgaccagcatgtatgtgaaggagttcctgatcagcagctcccaggatggccaccagtggaccctgttcttccagaatggcaaggtgaaggtgttccagggcaaccaggacagcttcacccctgtggtgaactccctggacccccccctgctgaccagatacctgaggatccacccccagtcctgggtgcaccagattgccctgagaatggaggtgctgggctgtgaggcccaggacctgtactga

SEQ ID NO: 104 - DNA, 4474 bp, Artificial Sequence
  Description of Artificial Sequence: Synthetic polynucleotide
atgcaaattgagttatccacctgtttcttcctctgtctcctgaggttctgcttctctgccaccaggagatactacctgggggctgtggagctgtcctgggactacatgcagtcagacctgggggagctgccagttgatgccaggtaagggtttaagggatggttggttggtggggtattaatgtttaattacctggagcacctgcctgaaatcactttttttcaggttcccccccagagtccccaagtccttccccttcaacacctcagtggtgtacaaaaagaccctgtttgtggagttcacagaccacctgttcaacatagccaagcccaggcccccctggatgggcctgctgggccccaccatccaggcagaggtttatgacacagtggtcatcaccctgaagaacatggcctcccaccctgtgtccctccatgctgtgggggtgagctactggaaggccagtgagggggcagaatatgatgaccagaccagccagagggagaaggaggatgacaaggtgttcccagggggcagccacacctatgtgtggcaggtcctgaaggagaatggccccatggcctctgaccccctctgcctcacctactcctacctgtcccatgtggacctggtgaaggacctcaactctggcctgattggagccctcctggtgtgcagggaggggagcctggccaaggaaaagacccagaccctgcacaagtttatcctgctctttgcagtctttgatgaggggaagtcctggcacagtgagaccaagaactccctgatgcaggacagagatgctgcctcagccagggcctggcccaagatgcacacagtgaatgggtatgtcaacaggagcctgccaggcctgattgggtgccacagaaagtcagtgtactggcatgtcattggcatgggcaccaccccagaggtgcactccatcttcctggagggccacaccttcctggtgaggaaccacagacaggccagcctggagatcagcccaatcaccttcctcacagcccagaccctcctcatggacctgggccagtttctcctgagctgccacatctcctcccaccagcatgatggcatggaggcctatgtgaaggtggacagctgccctgaggagccccagctcaggatgaagaacaatgaggaggcagaggactatgatgatgatctgacagactctgagatggatgtggtgagatttgatgatgacaacagcccctccttcatccagatcaggtctgtggccaagaagcaccctaagacctgggtgcactacattgcagctgaggaggaggactgggactatgcccccctggtcctggcccctgatgataggtcctacaagtcccagtacctgaacaatggcccccagaggatagggagaaagtacaagaaggtgaggttcatggcctacactgatgagaccttcaagactagggaagccatccagcatgagtctgggatcctgggccccctcctctatggggaggtgggggacaccctgctgatcatcttcaagaaccaggccagcaggccctacaacatttacccccatgggatcacagatgtgagacccctgtacagcaggagactgccaaagggggtgaagcacctgaaggacttccccatcctgccaggggagatcttcaagtacaagtggactgtgacagtggaggatgggcccaccaaatctgaccctagatgcctgaccagatactacagcagctttgtgaacatggagagggacctggcctctggactgattggccctctgctgatctgctacaaggagagtgtggaccagaggggaaaccagatcatgtctgacaagaggaatgtgatcctgttctcagtgtttgatgagaacagatcctggtacctcactgagaacatccagaggttcctgcccaacccagcaggggtgcagctggaggacccagagttccaggcctccaacatcatgcactccatcaatggctatgtctttgactccctgcagctgtcagtgtgcctgcatgaggtggcctactggtacatcctctccattggagcccagactgacttcctgtcagtcttcttcagtggctacaccttcaagcacaagatggtctatgaggacactctgaccctgttccccttctctggggagactgtgttcatgtccatggagaaccctggactgtggatcctgggctgccacaacagtgacttcaggaacaggggcatgactgccctgctgaaggtctccagctgtgacaagaacactggggactactatgaggactcctatgaggacatctctgcctacctgctgtccaagaacaatgccattgagcccaggtccttctcccagaacagcagacacccctccaccaggcagaagcagttcaatgcaaccaccatccctgaaaataccaccctgcagagtgaccaggaggagattgactatgatgacaccatctctgtggagatgaagaaggaggactttgacatctatgatgaggatgagaaccagagccctagaagcttccagaagaagaccagacactacttcattgctgcagtggaaagactgtgggactatgggatgagctcctccccccatgtgctgaggaacagggcccagtctggctctgtgccccagttcaagaaggtggtgttccaggagttcactgatggctccttcacccagcccctgtacaggggagagctgaatgagcacctgggcctgctgggcccctacatcagggctgaggtggaggacaatatcatggtgaccttcagaaaccaggcctccagaccttactccttctacagcagcctgatctcctatgaggaggaccagagacagggggctgagcccaggaagaactttgtgaagcccaatgagaccaagacctacttctggaaggtgcagcaccacatggcccccaccaaggatgagtttgactgcaaggcctgggcctacttctctgatgtggacctggagaaggatgtgcactctggcctgattggccccctgctggtgtgccacaccaacaccctgaaccctgcccatggcaggcaggtgactgtgcaggagtttgccctgttcttcaccatctttgatgagaccaagagctggtacttcactgagaacatggagaggaactgcagggccccctgcaacatccagatggaggaccccaccttcaaggagaactacaggttccatgccatcaatggctacatcatggacaccctgcctggcctggtgatggcccaggaccagaggatcaggtggtacctgctgagcatggggagcaatgagaacatccacagcatccacttctctggccatgtgttcacagtgaggaagaaggaggagtacaagatggccctgtacaacctgtaccctggggtgtttgagacagtggagatgctgccctccaaggctggaatctggagggtggagtgcctgattggggagcacctgcatgctggcatgagcaccctgttcctggtgtacagcaacaagtgccagacccccctgggcatggcctctggccacatcagagacttccagatcacagcctcaggccagtatggccagtgggcccccaagctggccaggctgcactactctggcagcatcaatgcctggtccaccaaggagcccttcagctggatcaaggtggacctcctggcccccatgatcatccatggcatcaagacccagggggccaggcagaagttcagctccctgtacatctcccagttcatcatcatgtactccctggatggcaagaagtggcagacctacagaggcaacagcacaggcaccctgatggtgttctttggcaatgtggacagctctgggatcaagcacaacatcttcaacccccccatcattgccaggtacatcagactgcaccccacccactactccatcaggtccaccctgagaatggagctgatgggctgtgacctgaacagctgcagcatgcccctgggcatggagagcaaggccatctctgatgcccagatcacagccagcagctacttcaccaacatgtttgccacctggtcccccagcaaggccaggctgcacctgcagggcaggagcaatgcctggaggccccaggtgaacaaccccaaggagtggctgcaggtggacttccagaagaccatgaaggtgacaggggtgaccacccagggggtgaagtccctgctgaccagcatgtatgtgaaggagttcctgatcagcagctcccaggatggccaccagtggaccctgttcttccagaatggcaaggtgaaggtgttccagggcaaccaggacagcttcacccctgtggtgaactccctggacccccccctgctgaccagatacctgaggatccacccccagtcctgggtgcaccagattgccctgagaatggaggtgctgggctgtgaggcccaggacctgtactga

SEQ ID NO: 105 - DNA, 4542 bp, Artificial Sequence
  Description of Artificial Sequence: Synthetic polynucleotide
atgcaaattgagttatccacctgtttcttcctctgtctcctgaggttctgcttctctgccaccaggagatactacctgggggctgtggagctgtcctgggactacatgcaaagtgatctgggtgagctgcctgtggatgcaaggtaaaggcatgtcctgtagggtctgatcggggccaggattgtggggatgtctccttgctaatagtagaaaagagtagtatggaagcattacttccagctgctttttgaagtgtccaccaaaatgaacgactttttcctttcttcacgcagatttcctcctagagtgccaaaatcttttccattcaacacctcagtggtgtacaaaaagaccctgtttgtggagttcacagaccacctgttcaacatagccaagcccaggcccccctggatgggcctgctgggccccaccatccaggcagaggtttatgacacagtggtcatcaccctgaagaacatggcctcccaccctgtgtccctccatgctgtgggggtgagctactggaaggccagtgagggggcagaatatgatgaccagaccagccagagggagaaggaggatgacaaggtgttcccagggggcagccacacctatgtgtggcaggtcctgaaggagaatggccccatggcctctgaccccctctgcctcacctactcctacctgtcccatgtggacctggtgaaggacctcaactctggcctgattggagccctcctggtgtgcagggaggggagcctggccaaggaaaagacccagaccctgcacaagtttatcctgctctttgcagtctttgatgaggggaagtcctggcacagtgagaccaagaactccctgatgcaggacagagatgctgcctcagccagggcctggcccaagatgcacacagtgaatgggtatgtcaacaggagcctgccaggcctgattgggtgccacagaaagtcagtgtactggcatgtcattggcatgggcaccaccccagaggtgcactccatcttcctggagggccacaccttcctggtgaggaaccacagacaggccagcctggagatcagcccaatcaccttcctcacagcccagaccctcctcatggacctgggccagtttctcctgagctgccacatctcctcccaccagcatgatggcatggaggcctatgtgaaggtggacagctgccctgaggagccccagctcaggatgaagaacaatgaggaggcagaggactatgatgatgatctgacagactctgagatggatgtggtgagatttgatgatgacaacagcccctccttcatccagatcaggtctgtggccaagaagcaccctaagacctgggtgcactacattgcagctgaggaggaggactgggactatgcccccctggtcctggcccctgatgataggtcctacaagtcccagtacctgaacaatggcccccagaggatagggagaaagtacaagaaggtgaggttcatggcctacactgatgagaccttcaagactagggaagccatccagcatgagtctgggatcctgggccccctcctctatggggaggtgggggacaccctgctgatcatcttcaagaaccaggccagcaggccctacaacatttacccccatgggatcacagatgtgagacccctgtacagcaggagactgccaaagggggtgaagcacctgaaggacttccccatcctgccaggggagatcttcaagtacaagtggactgtgacagtggaggatgggcccaccaaatctgaccctagatgcctgaccagatactacagcagctttgtgaacatggagagggacctggcctctggactgattggccctctgctgatctgctacaaggagagtgtggaccagaggggaaaccagatcatgtctgacaagaggaatgtgatcctgttctcagtgtttgatgagaacagatcctggtacctcactgagaacatccagaggttcctgcccaacccagcaggggtgcagctggaggacccagagttccaggcctccaacatcatgcactccatcaatggctatgtctttgactccctgcagctgtcagtgtgcctgcatgaggtggcctactggtacatcctctccattggagcccagactgacttcctgtcagtcttcttcagtggctacaccttcaagcacaagatggtctatgaggacactctgaccctgttccccttctctggggagactgtgttcatgtccatggagaaccctggactgtggatcctgggctgccacaacagtgacttcaggaacaggggcatgactgccctgctgaaggtctccagctgtgacaagaacactggggactactatgaggactcctatgaggacatctctgcctacctgctgtccaagaacaatgccattgagcccaggtccttctcccagaacagcagacacccctccaccaggcagaagcagttcaatgcaaccaccatccctgaaaataccaccctgcagagtgaccaggaggagattgactatgatgacaccatctctgtggagatgaagaaggaggactttgacatctatgatgaggatgagaaccagagccctagaagcttccagaagaagaccagacactacttcattgctgcagtggaaagactgtgggactatgggatgagctcctccccccatgtgctgaggaacagggcccagtctggctctgtgccccagttcaagaaggtggtgttccaggagttcactgatggctccttcacccagcccctgtacaggggagagctgaatgagcacctgggcctgctgggcccctacatcagggctgaggtggaggacaatatcatggtgaccttcagaaaccaggcctccagaccttactccttctacagcagcctgatctcctatgaggaggaccagagacagggggctgagcccaggaagaactttgtgaagcccaatgagaccaagacctacttctggaaggtgcagcaccacatggcccccaccaaggatgagtttgactgcaaggcctgggcctacttctctgatgtggacctggagaaggatgtgcactctggcctgattggccccctgctggtgtgccacaccaacaccctgaaccctgcccatggcaggcaggtgactgtgcaggagtttgccctgttcttcaccatctttgatgagaccaagagctggtacttcactgagaacatggagaggaactgcagggccccctgcaacatccagatggaggaccccaccttcaaggagaactacaggttccatgccatcaatggctacatcatggacaccctgcctggcctggtgatggcccaggaccagaggatcaggtggtacctgctgagcatggggagcaatgagaacatccacagcatccacttctctggccatgtgttcacagtgaggaagaaggaggagtacaagatggccctgtacaacctgtaccctggggtgtttgagacagtggagatgctgccctccaaggctggaatctggagggtggagtgcctgattggggagcacctgcatgctggcatgagcaccctgttcctggtgtacagcaacaagtgccagacccccctgggcatggcctctggccacatcagagacttccagatcacagcctcaggccagtatggccagtgggcccccaagctggccaggctgcactactctggcagcatcaatgcctggtccaccaaggagcccttcagctggatcaaggtggacctcctggcccccatgatcatccatggcatcaagacccagggggccaggcagaagttcagctccctgtacatctcccagttcatcatcatgtactccctggatggcaagaagtggcagacctacagaggcaacagcacaggcaccctgatggtgttctttggcaatgtggacagctctgggatcaagcacaacatcttcaacccccccatcattgccaggtacatcagactgcaccccacccactactccatcaggtccaccctgagaatggagctgatgggctgtgacctgaacagctgcagcatgcccctgggcatggagagcaaggccatctctgatgcccagatcacagccagcagctacttcaccaacatgtttgccacctggtcccccagcaaggccaggctgcacctgcagggcaggagcaatgcctggaggccccaggtgaacaaccccaaggagtggctgcaggtggacttccagaagaccatgaaggtgacaggggtgaccacccagggggtgaagtccctgctgaccagcatgtatgtgaaggagttcctgatcagcagctcccaggatggccaccagtggaccctgttcttccagaatggcaaggtgaaggtgttccagggcaaccaggacagcttcacccctgtggtgaactccctggacccccccctgctgaccagatacctgaggatccacccccagtcctgggtgcaccagattgccctgagaatggaggtgctgggctgtgaggcccaggacctgtactga

SEQ ID NO: 106 - DNA, 4792 bp, Artificial Sequence
  Description of Artificial Sequence: Synthetic polynucleotide
atgcaaattgagttatccacctgtttcttcctctgtctcctgaggttctgcttctctgccaccaggagatactacctgggggctgtggagctgtcctgggactacatgcaaagtgatctgggtgagctgcctgtggatgcaaggtaaaggcatgtcctgtagggtctgatcggggccaggattgtggggatgtaagtctgcttggaggaaggtgcagacatcgggttaggatggttgtgatgctacctgggccccaaagaaacatttctgggtaaggtgtgcacacatctgtgttattagcagaaatgctaactgccaattcttttcataggtctgacctatttatgattcttatcatatggcacctaatgtatcagttgagttgtgaaaacagtgtttcggtttaatggatgttagggatttatatacaacttcaaatttgcctccttgctaatagtagaaaagagtagtatggaagcattacttccagctgctttttgaagtgtccaccaaaatgaacgactttttcctttcttcacgcagatttcctcctagagtgccaaaatcttttccattcaacacctcagtggtgtacaaaaagaccctgtttgtggagttcacagaccacctgttcaacatagccaagcccaggcccccctggatgggcctgctgggccccaccatccaggcagaggtttatgacacagtggtcatcaccctgaagaacatggcctcccaccctgtgtccctccatgctgtgggggtgagctactggaaggccagtgagggggcagaatatgatgaccagaccagccagagggagaaggaggatgacaaggtgttcccagggggcagccacacctatgtgtggcaggtcctgaaggagaatggccccatggcctctgaccccctctgcctcacctactcctacctgtcccatgtggacctggtgaaggacctcaactctggcctgattggagccctcctggtgtgcagggaggggagcctggccaaggaaaagacccagaccctgcacaagtttatcctgctctttgcagtctttgatgaggggaagtcctggcacagtgagaccaagaactccctgatgcaggacagagatgctgcctcagccagggcctggcccaagatgcacacagtgaatgggtatgtcaacaggagcctgccaggcctgattgggtgccacagaaagtcagtgtactggcatgtcattggcatgggcaccaccccagaggtgcactccatcttcctggagggccacaccttcctggtgaggaaccacagacaggccagcctggagatcagcccaatcaccttcctcacagcccagaccctcctcatggacctgggccagtttctcctgagctgccacatctcctcccaccagcatgatggcatggaggcctatgtgaaggtggacagctgccctgaggagccccagctcaggatgaagaacaatgaggaggcagaggactatgatgatgatctgacagactctgagatggatgtggtgagatttgatgatgacaacagcccctccttcatccagatcaggtctgtggccaagaagcaccctaagacctgggtgcactacattgcagctgaggaggaggactgggactatgcccccctggtcctggcccctgatgataggtcctacaagtcccagtacctgaacaatggcccccagaggatagggagaaagtacaagaaggtgaggttcatggcctacactgatgagaccttcaagactagggaagccatccagcatgagtctgggatcctgggccccctcctctatggggaggtgggggacaccctgctgatcatcttcaagaaccaggccagcaggccctacaacatttacccccatgggatcacagatgtgagacccctgtacagcaggagactgccaaagggggtgaagcacctgaaggacttccccatcctgccaggggagatcttcaagtacaagtggactgtgacagtggaggatgggcccaccaaatctgaccctagatgcctgaccagatactacagcagctttgtgaacatggagagggacctggcctctggactgattggccctctgctgatctgctacaaggagagtgtggaccagaggggaaaccagatcatgtctgacaagaggaatgtgatcctgttctcagtgtttgatgagaacagatcctggtacctcactgagaacatccagaggttcctgcccaacccagcaggggtgcagctggaggacccagagttccaggcctccaacatcatgcactccatcaatggctatgtctttgactccctgcagctgtcagtgtgcctgcatgaggtggcctactggtacatcctctccattggagcccagactgacttcctgtcagtcttcttcagtggctacaccttcaagcacaagatggtctatgaggacactctgaccctgttccccttctctggggagactgtgttcatgtccatggagaaccctggactgtggatcctgggctgccacaacagtgacttcaggaacaggggcatgactgccctgctgaaggtctccagctgtgacaagaacactggggactactatgaggactcctatgaggacatctctgcctacctgctgtccaagaacaatgccattgagcccaggtccttctcccagaacagcagacacccctccaccaggcagaagcagttcaatgcaaccaccatccctgaaaataccaccctgcagagtgaccaggaggagattgactatgatgacaccatctctgtggagatgaagaaggaggactttgacatctatgatgaggatgagaaccagagccctagaagcttccagaagaagaccagacactacttcattgctgcagtggaaagactgtgggactatgggatgagctcctccccccatgtgctgaggaacagggcccagtctggctctgtgccccagttcaagaaggtggtgttccaggagttcactgatggctccttcacccagcccctgtacaggggagagctgaatgagcacctgggcctgctgggcccctacatcagggctgaggtggaggacaatatcatggtgaccttcagaaaccaggcctccagaccttactccttctacagcagcctgatctcctatgaggaggaccagagacagggggctgagcccaggaagaactttgtgaagcccaatgagaccaagacctacttctggaaggtgcagcaccacatggcccccaccaaggatgagtttgactgcaaggcctgggcctacttctctgatgtggacctggagaaggatgtgcactctggcctgattggccccctgctggtgtgccacaccaacaccctgaaccctgcccatggcaggcaggtgactgtgcaggagtttgccctgttcttcaccatctttgatgagaccaagagctggtacttcactgagaacatggagaggaactgcagggccccctgcaacatccagatggaggaccccaccttcaaggagaactacaggttccatgccatcaatggctacatcatggacaccctgcctggcctggtgatggcccaggaccagaggatcaggtggtacctgctgagcatggggagcaatgagaacatccacagcatccacttctctggccatgtgttcacagtgaggaagaaggaggagtacaagatggccctgtacaacctgtaccctggggtgtttgagacagtggagatgctgccctccaaggctggaatctggagggtggagtgcctgattggggagcacctgcatgctggcatgagcaccctgttcctggtgtacagcaacaagtgccagacccccctgggcatggcctctggccacatcagagacttccagatcacagcctcaggccagtatggccagtgggcccccaagctggccaggctgcactactctggcagcatcaatgcctggtccaccaaggagcccttcagctggatcaaggtggacctcctggcccccatgatcatccatggcatcaagacccagggggccaggcagaagttcagctccctgtacatctcccagttcatcatcatgtactccctggatggcaagaagtggcagacctacagaggcaacagcacaggcaccctgatggtgttctttggcaatgtggacagctctgggatcaagcacaacatcttcaacccccccatcattgccaggtacatcagactgcaccccacccactactccatcaggtccaccctgagaatggagctgatgggctgtgacctgaacagctgcagcatgcccctgggcatggagagcaaggccatctctgatgcccagatcacagccagcagctacttcaccaacatgtttgccacctggtcccccagcaaggccaggctgcacctgcagggcaggagcaatgcctggaggccccaggtgaacaaccccaaggagtggctgcaggtggacttccagaagaccatgaaggtgacaggggtgaccacccagggggtgaagtccctgctgaccagcatgtatgtgaaggagttcctgatcagcagctcccaggatggccaccagtggaccctgttcttccagaatggcaaggtgaaggtgttccagggcaaccaggacagcttcacccctgtggtgaactccctggacccccccctgctgaccagatacctgaggatccacccccagtcctgggtgcaccagattgccctgagaatggaggtgctgggctgtgaggcccaggacctgtactga

SEQ ID NO: 107 - DNA, 4522 bp, Artificial Sequence
  Description of Artificial Sequence: Synthetic polynucleotide
atgcaaattgagttatccacctgtttcttcctctgtctcctgaggttctgcttctctgccaccaggagatactacctgggggctgtggagctgtcctgggactacatgcaaagtgatctgggtgagctgcctgtggatgcaaggttggtatcaaggttacaagacaggtttaaggagaccaatagaaactgggcatgtggagacagagaagactcttgggtttctgataggcactgactctctctgcctattggtctattttcccacccttagatttcctcctagagtgccaaaatcttttccattcaacacctcagtggtgtacaaaaagaccctgtttgtggagttcacagaccacctgttcaacatagccaagcccaggcccccctggatgggcctgctgggccccaccatccaggcagaggtttatgacacagtggtcatcaccctgaagaacatggcctcccaccctgtgtccctccatgctgtgggggtgagctactggaaggccagtgagggggcagaatatgatgaccagaccagccagagggagaaggaggatgacaaggtgttcccagggggcagccacacctatgtgtggcaggtcctgaaggagaatggccccatggcctctgaccccctctgcctcacctactcctacctgtcccatgtggacctggtgaaggacctcaactctggcctgattggagccctcctggtgtgcagggaggggagcctggccaaggaaaagacccagaccctgcacaagtttatcctgctctttgcagtctttgatgaggggaagtcctggcacagtgagaccaagaactccctgatgcaggacagagatgctgcctcagccagggcctggcccaagatgcacacagtgaatgggtatgtcaacaggagcctgccaggcctgattgggtgccacagaaagtcagtgtactggcatgtcattggcatgggcaccaccccagaggtgcactccatcttcctggagggccacaccttcctggtgaggaaccacagacaggccagcctggagatcagcccaatcaccttcctcacagcccagaccctcctcatggacctgggccagtttctcctgagctgccacatctcctcccaccagcatgatggcatggaggcctatgtgaaggtggacagctgccctgaggagccccagctcaggatgaagaacaatgaggaggcagaggactatgatgatgatctgacagactctgagatggatgtggtgagatttgatgatgacaacagcccctccttcatccagatcaggtctgtggccaagaagcaccctaagacctgggtgcactacattgcagctgaggaggaggactgggactatgcccccctggtcctggcccctgatgataggtcctacaagtcccagtacctgaacaatggcccccagaggatagggagaaagtacaagaaggtgaggttcatggcctacactgatgagaccttcaagactagggaagccatccagcatgagtctgggatcctgggccccctcctctatggggaggtgggggacaccctgctgatcatcttcaagaaccaggccagcaggccctacaacatttacccccatgggatcacagatgtgagacccctgtacagcaggagactgccaaagggggtgaagcacctgaaggacttccccatcctgccaggggagatcttcaagtacaagtggactgtgacagtggaggatgggcccaccaaatctgaccctagatgcctgaccagatactacagcagctttgtgaacatggagagggacctggcctctggactgattggccctctgctgatctgctacaaggagagtgtggaccagaggggaaaccagatcatgtctgacaagaggaatgtgatcctgttctcagtgtttgatgagaacagatcctggtacctcactgagaacatccagaggttcctgcccaacccagcaggggtgcagctggaggacccagagttccaggcctccaacatcatgcactccatcaatggctatgtctttgactccctgcagctgtcagtgtgcctgcatgaggtggcctactggtacatcctctccattggagcccagactgacttcctgtcagtcttcttcagtggctacaccttcaagcacaagatggtctatgaggacactctgaccctgttccccttctctggggagactgtgttcatgtccatggagaaccctggactgtggatcctgggctgccacaacagtgacttcaggaacaggggcatgactgccctgctgaaggtctccagctgtgacaagaacactggggactactatgaggactcctatgaggacatctctgcctacctgctgtccaagaacaatgccattgagcccaggtccttctcccagaacagcagacacccctccaccaggcagaagcagttcaatgcaaccaccatccctgaaaataccaccctgcagagtgaccaggaggagattgactatgatgacaccatctctgtggagatgaagaaggaggactttgacatctatgatgaggatgagaaccagagccctagaagcttccagaagaagaccagacactacttcattgctgcagtggaaagactgtgggactatgggatgagctcctccccccatgtgctgaggaacagggcccagtctggctctgtgccccagttcaagaaggtggtgttccaggagttcactgatggctccttcacccagcccctgtacaggggagagctgaatgagcacctgggcctgctgggcccctacatcagggctgaggtggaggacaatatcatggtgaccttcagaaaccaggcctccagaccttactccttctacagcagcctgatctcctatgaggaggaccagagacagggggctgagcccaggaagaactttgtgaagcccaatgagaccaagacctacttctggaaggtgcagcaccacatggcccccaccaaggatgagtttgactgcaaggcctgggcctacttctctgatgtggacctggagaaggatgtgcactctggcctgattggccccctgctggtgtgccacaccaacaccctgaaccctgcccatggcaggcaggtgactgtgcaggagtttgccctgttcttcaccatctttgatgagaccaagagctggtacttcactgagaacatggagaggaactgcagggccccctgcaacatccagatggaggaccccaccttcaaggagaactacaggttccatgccatcaatggctacatcatggacaccctgcctggcctggtgatggcccaggaccagaggatcaggtggtacctgctgagcatggggagcaatgagaacatccacagcatccacttctctggccatgtgttcacagtgaggaagaaggaggagtacaagatggccctgtacaacctgtaccctggggtgtttgagacagtggagatgctgccctccaaggctggaatctggagggtggagtgcctgattggggagcacctgcatgctggcatgagcaccctgttcctggtgtacagcaacaagtgccagacccccctgggcatggcctctggccacatcagagacttccagatcacagcctcaggccagtatggccagtgggcccccaagctggccaggctgcactactctggcagcatcaatgcctggtccaccaaggagcccttcagctggatcaaggtggacctcctggcccccatgatcatccatggcatcaagacccagggggccaggcagaagttcagctccctgtacatctcccagttcatcatcatgtactccctggatggcaagaagtggcagacctacagaggcaacagcacaggcaccctgatggtgttctttggcaatgtggacagctctgggatcaagcacaacatcttcaacccccccatcattgccaggtacatcagactgcaccccacccactactccatcaggtccaccctgagaatggagctgatgggctgtgacctgaacagctgcagcatgcccctgggcatggagagcaaggccatctctgatgcccagatcacagccagcagctacttcaccaacatgtttgccacctggtcccccagcaaggccaggctgcacctgcagggcaggagcaatgcctggaggccccaggtgaacaaccccaaggagtggctgcaggtggacttccagaagaccatgaaggtgacaggggtgaccacccagggggtgaagtccctgctgaccagcatgtatgtgaaggagttcctgatcagcagctcccaggatggccaccagtggaccctgttcttccagaatggcaaggtgaaggtgttccagggcaaccaggacagcttcacccctgtggtgaactccctggacccccccctgctgaccagatacctgaggatccacccccagtcctgggtgcaccagattgccctgagaatggaggtgctgggctgtgaggcccaggacctgtactga

SEQ ID NO: 108 - DNA, 4676 bp, Artificial Sequence
  Description of Artificial Sequence: Synthetic polynucleotide
atgcaaattgagttatccacctgtttcttcctctgtctcctgaggttctgcttctctgccaccaggagatactacctgggggctgtggagctgtcctgggactacatgcaaagtgatctgggtgagctgcctgtggatgcaaggtaagcactttttgactattggtactctctcttccccatactcaaaaagttcttaccagttattcaaaccaacaaatcctgaagccatgtttaaggttaggtacaggtatggaatcaaatggcaagggtattaacatttggaaactaacatagctgagcatcagagaagcttgtatttttctcactccttgccttgattgaatcatataagctgttttagagttggatttgagcctacctagaatttttcttcccaacctctcatctttttttctcttatacagatttcctcctagagtgccaaaatcttttccattcaacacctcagtggtgtacaaaaagaccctgtttgtggagttcacagaccacctgttcaacatagccaagcccaggcccccctggatgggcctgctgggccccaccatccaggcagaggtttatgacacagtggtcatcaccctgaagaacatggcctcccaccctgtgtccctccatgctgtgggggtgagctactggaaggccagtgagggggcagaatatgatgaccagaccagccagagggagaaggaggatgacaaggtgttcccagggggcagccacacctatgtgtggcaggtcctgaaggagaatggccccatggcctctgaccccctctgcctcacctactcctacctgtcccatgtggacctggtgaaggacctcaactctggcctgattggagccctcctggtgtgcagggaggggagcctggccaaggaaaagacccagaccctgcacaagtttatcctgctctttgcagtctttgatgaggggaagtcctggcacagtgagaccaagaactccctgatgcaggacagagatgctgcctcagccagggcctggcccaagatgcacacagtgaatgggtatgtcaacaggagcctgccaggcctgattgggtgccacagaaagtcagtgtactggcatgtcattggcatgggcaccaccccagaggtgcactccatcttcctggagggccacaccttcctggtgaggaaccacagacaggccagcctggagatcagcccaatcaccttcctcacagcccagaccctcctcatggacctgggccagtttctcctgagctgccacatctcctcccaccagcatgatggcatggaggcctatgtgaaggtggacagctgccctgaggagccccagctcaggatgaagaacaatgaggaggcagaggactatgatgatgatctgacagactctgagatggatgtggtgagatttgatgatgacaacagcccctccttcatccagatcaggtctgtggccaagaagcaccctaagacctgggtgcactacattgcagctgaggaggaggactgggactatgcccccctggtcctggcccctgatgataggtcctacaagtcccagtacctgaacaatggcccccagaggatagggagaaagtacaagaaggtgaggttcatggcctacactgatgagaccttcaagactagggaagccatccagcatgagtctgggatcctgggccccctcctctatggggaggtgggggacaccctgctgatcatcttcaagaaccaggccagcaggccctacaacatttacccccatgggatcacagatgtgagacccctgtacagcaggagactgccaaagggggtgaagcacctgaaggacttccccatcctgccaggggagatcttcaagtacaagtggactgtgacagtggaggatgggcccaccaaatctgaccctagatgcctgaccagatactacagcagctttgtgaacatggagagggacctggcctctggactgattggccctctgctgatctgctacaaggagagtgtggaccagaggggaaaccagatcatgtctgacaagaggaatgtgatcctgttctcagtgtttgatgagaacagatcctggtacctcactgagaacatccagaggttcctgcccaacccagcaggggtgcagctggaggacccagagttccaggcctccaacatcatgcactccatcaatggctatgtctttgactccctgcagctgtcagtgtgcctgcatgaggtggcctactggtacatcctctccattggagcccagactgacttcctgtcagtcttcttcagtggctacaccttcaagcacaagatggtctatgaggacactctgaccctgttccccttctctggggagactgtgttcatgtccatggagaaccctggactgtggatcctgggctgccacaacagtgacttcaggaacaggggcatgactgccctgctgaaggtctccagctgtgacaagaacactggggactactatgaggactcctatgaggacatctctgcctacctgctgtccaagaacaatgccattgagcccaggtccttctcccagaacagcagacacccctccaccaggcagaagcagttcaatgcaaccaccatccctgaaaataccaccctgcagagtgaccaggaggagattgactatgatgacaccatctctgtggagatgaagaaggaggactttgacatctatgatgaggatgagaaccagagccctagaagcttccagaagaagaccagacactacttcattgctgcagtggaaagactgtgggactatgggatgagctcctccccccatgtgctgaggaacagggcccagtctggctctgtgccccagttcaagaaggtggtgttccaggagttcactgatggctccttcacccagcccctgtacaggggagagctgaatgagcacctgggcctgctgggcccctacatcagggctgaggtggaggacaatatcatggtgaccttcagaaaccaggcctccagaccttactccttctacagcagcctgatctcctatgaggaggaccagagacagggggctgagcccaggaagaactttgtgaagcccaatgagaccaagacctacttctggaaggtgcagcaccacatggcccccaccaaggatgagtttgactgcaaggcctgggcctacttctctgatgtggacctggagaaggatgtgcactctggcctgattggccccctgctggtgtgccacaccaacaccctgaaccctgcccatggcaggcaggtgactgtgcaggagtttgccctgttcttcaccatctttgatgagaccaagagctggtacttcactgagaacatggagaggaactgcagggccccctgcaacatccagatggaggaccccaccttcaaggagaactacaggttccatgccatcaatggctacatcatggacaccctgcctggcctggtgatggcccaggaccagaggatcaggtggtacctgctgagcatggggagcaatgagaacatccacagcatccacttctctggccatgtgttcacagtgaggaagaaggaggagtacaagatggccctgtacaacctgtaccctggggtgtttgagacagtggagatgctgccctccaaggctggaatctggagggtggagtgcctgattggggagcacctgcatgctggcatgagcaccctgttcctggtgtacagcaacaagtgccagacccccctgggcatggcctctggccacatcagagacttccagatcacagcctcaggccagtatggccagtgggcccccaagctggccaggctgcactactctggcagcatcaatgcctggtccaccaaggagcccttcagctggatcaaggtggacctcctggcccccatgatcatccatggcatcaagacccagggggccaggcagaagttcagctccctgtacatctcccagttcatcatcatgtactccctggatggcaagaagtggcagacctacagaggcaacagcacaggcaccctgatggtgttctttggcaatgtggacagctctgggatcaagcacaacatcttcaacccccccatcattgccaggtacatcagactgcaccccacccactactccatcaggtccaccctgagaatggagctgatgggctgtgacctgaacagctgcagcatgcccctgggcatggagagcaaggccatctctgatgcccagatcacagccagcagctacttcaccaacatgtttgccacctggtcccccagcaaggccaggctgcacctgcagggcaggagcaatgcctggaggccccaggtgaacaaccccaaggagtggctgcaggtggacttccagaagaccatgaaggtgacaggggtgaccacccagggggtgaagtccctgctgaccagcatgtatgtgaaggagttcctgatcagcagctcccaggatggccaccagtggaccctgttcttccagaatggcaaggtgaaggtgttccagggcaaccaggacagcttcacccctgtggtgaactccctggacccccccctgctgaccagatacctgaggatccacccccagtcctgggtgcaccagattgccctgagaatggaggtgctgggctgtgaggcccaggacctgtactga

SEQ ID NO: 109 - DNA, 4392 bp, Artificial Sequence
  Description of Artificial Sequence: Synthetic polynucleotide
atgcaaattgagttatccacctgtttcttcctctgtctcctgaggttctgcttctctgccaccaggagatactacctgggggctgtggagctgtcctgggactacatgcaaagtgatctgggtgagctgcctgtggatgcaagatttcctcctagagtgccaaaatcttttccattcaacacctcagtggtgtacaaaaagaccctgtttgtggagttcacagaccacctgttcaacatagccaagcccaggcccccctggatgggcctgctgggccccaccatccaggcagaggtttatgacacagtggtcatcaccctgaagaacatggcctcccaccctgtgtccctccatgctgtgggggtgagctactggaaggccagtgagggggcagaatatgatgaccagaccagccagagggagaaggaggatgacaaggtgttcccagggggcagccacacctatgtgtggcaggtcctgaaggagaatggccccatggcctctgaccccctctgcctcacctactcctacctgtcccatgtggacctggtgaaggacctcaactctggcctgattggagccctcctggtgtgcagggaggggagcctggccaaggaaaagacccagaccctgcacaagtttatcctgctctttgcagtctttgatgaggggaagtcctggcacagtgagaccaagaactccctgatgcaggacagagatgctgcctcagccagggcctggcccaagatgcacacagtgaatgggtatgtcaacaggagcctgccaggcctgattgggtgccacagaaagtcagtgtactggcatgtcattggcatgggcaccaccccagaggtgcactccatcttcctggagggccacaccttcctggtgaggaaccacagacaggccagcctggagatcagcccaatcaccttcctcacagcccagaccctcctcatggacctgggccagtttctcctgagctgccacatctcctcccaccagcatgatggcatggaggcctatgtgaaggtggacagctgccctgaggagccccagctcaggatgaagaacaatgaggaggcagaggactatgatgatgatctgacagactctgagatggatgtggtgagatttgatgatgacaacagcccctccttcatccagatcaggtctgtggccaagaagcaccctaagacctgggtgcactacattgcagctgaggaggaggactgggactatgcccccctggtcctggcccctgatgataggtcctacaagtcccagtacctgaacaatggcccccagaggatagggagaaagtacaagaaggtgaggttcatggcctacactgatgagaccttcaagactagggaagccatccagcatgagtctgggatcctgggccccctcctctatggggaggtgggggacaccctgctgatcatcttcaagaaccaggccagcaggccctacaacatttacccccatgggatcacagatgtgagacccctgtacagcaggagactgccaaagggggtgaagcacctgaaggacttccccatcctgccaggggagatcttcaagtacaagtggactgtgacagtggaggatgggcccaccaaatctgaccctagatgcctgaccagatactacagcagctttgtgaacatggagagggacctggcctctggactgattggccctctgctgatctgctacaaggagagtgtggaccagaggggaaaccagatcatgtctgacaagaggaatgtgatcctgttctcagtgtttgatgagaacagatcctggtacctcactgagaacatccagaggttcctgcccaacccagcaggggtgcagctggaggacccagagttccaggcctccaacatcatgcactccatcaatggctatgtctttgactccctgcagctgtcagtgtgcctgcatgaggtggcctactggtacatcctctccattggagcccagactgacttcctgtcagtcttcttcagtggctacaccttcaagcacaagatggtctatgaggacactctgaccctgttccccttctctggggagactgtgttcatgtccatggagaaccctggactgtggatcctgggctgccacaacagtgacttcaggaacaggggcatgactgccctgctgaaggtctccagctgtgacaagaacactggggactactatgaggactcctatgaggacatctctgcctacctgctgtccaagaacaatgccattgagcccaggtccttctcccagaacagcagacacccctccaccaggcagaagcagttcaatgcaaccaccatccctgaaaataccaccctgcagagtgaccaggaggagattgactatgatgacaccatctctgtggagatgaagaaggaggactttgacatctatgatgaggatgagaaccagagccctagaagcttccagaagaagaccagacactacttcattgctgcagtggaaagactgtgggactatgggatgagctcctccccccatgtgctgaggaacagggcccagtctggctctgtgccccagttcaagaaggtggtgttccaggagttcactgatggctccttcacccagcccctgtacaggggagagctgaatgagcacctgggcctgctgggcccctacatcagggctgaggtggaggacaatatcatggtgaccttcagaaaccaggcctccagaccttactccttctacagcagcctgatctcctatgaggaggaccagagacagggggctgagcccaggaagaactttgtgaagcccaatgagaccaagacctacttctggaaggtgcagcaccacatggcccccaccaaggatgagtttgactgcaaggcctgggcctacttctctgatgtggacctggagaaggatgtgcactctggcctgattggccccctgctggtgtgccacaccaacaccctgaaccctgcccatggcaggcaggtgactgtgcaggagtttgccctgttcttcaccatctttgatgagaccaagagctggtacttcactgagaacatggagaggaactgcagggccccctgcaacatccagatggaggaccccaccttcaaggagaactacaggttccatgccatcaatggctacatcatggacaccctgcctggcctggtgatggcccaggaccagaggatcaggtggtacctgctgagcatggggagcaatgagaacatccacagcatccacttctctggccatgtgttcacagtgaggaagaaggaggagtacaagatggccctgtacaacctgtaccctggggtgtttgagacagtggagatgctgccctccaaggctggaatctggagggtggagtgcctgattggggagcacctgcatgctggcatgagcaccctgttcctggtgtacagcaacaagtgccagacccccctgggcatggcctctggccacatcagagacttccagatcacagcctcaggccagtatggccagtgggcccccaagctggccaggctgcactactctggcagcatcaatgcctggtccaccaaggagcccttcagctggatcaaggtggacctcctggcccccatgatcatccatggcatcaagacccagggggccaggcagaagttcagctccctgtacatctcccagttcatcatcatgtactccctggatggcaagaagtggcagacctacagaggcaacagcacaggcaccctgatggtgttctttggcaatgtggacagctctgggatcaagcacaacatcttcaacccccccatcattgccaggtacatcagactgcaccccacccactactccatcaggtccaccctgagaatggagctgatgggctgtgacctgaacagctgcagcatgcccctgggcatggagagcaaggccatctctgatgcccagatcacagccagcagctacttcaccaacatgtttgccacctggtcccccagcaaggccaggctgcacctgcagggcaggagcaatgcctggaggccccaggtgaacaaccccaaggagtggctgcaggtggacttccagaagaccatgaaggtgacaggggtgaccacccagggggtgaagtccctgctgaccagcatgtatgtgaaggagttcctgatcagcagctcccaggatggccaccagtggaccctgttcttccagaatggcaaggtgaaggtgttccagggcaaccaggacagcttcacccctgtggtgaactccctggacccccccctgctgaccagatacctgaggatccacccccagtcctgggtgcaccagattgccctgagaatggaggtgctgggctgtgaggcccaggacctgtactga

SEQ ID NO: 110 - DNA, 4542 bp, Artificial Sequence
  Description of Artificial Sequence: Synthetic polynucleotide
atgcagattgagctgagcacctgcttcttcctgtgcctgctgaggttctgcttctctgccaccaggagatactacctgggggctgtggagctgagctgggactacatgcagtctgacctgggggagctgcctgtggatgccaggtaaaggcatgtcctgtagggtctgatcggggccaggattgtggggatgtctccttgctaatagtagaaaagagtagtatggaagcattacttccagctgctttttgaagtgtccaccaaaatgaacgactttttcctttcttcacgcaggttcccccccagagtgcccaagagcttccccttcaacacctctgtggtgtacaagaagaccctgtttgtggagttcactgaccacctgttcaacattgccaagcccaggcccccctggatgggcctgctgggccccaccatccaggctgaggtgtatgacactgtggtgatcaccctgaagaacatggccagccaccctgtgagcctgcatgctgtgggggtgagctactggaaggcctctgagggggctgagtatgatgaccagaccagccagagggagaaggaggatgacaaggtgttccctgggggcagccacacctatgtgtggcaggtgctgaaggagaatggccccatggcctctgaccccctgtgcctgacctacagctacctgagccatgtggacctggtgaaggacctgaactctggcctgattggggccctgctggtgtgcagggagggcagcctggccaaggagaagacccagaccctgcacaagttcatcctgctgtttgctgtgtttgatgagggcaagagctggcactctgaaaccaagaacagcctgatgcaggacagggatgctgcctctgccagggcctggcccaagatgcacactgtgaatggctatgtgaacaggagcctgcctggcctgattggctgccacaggaagtctgtgtactggcatgtgattggcatgggcaccacccctgaggtgcacagcatcttcctggagggccacaccttcctggtcaggaaccacaggcaggccagcctggagatcagccccatcaccttcctgactgcccagaccctgctgatggacctgggccagttcctgctgagctgccacatcagcagccaccagcatgatggcatggaggcctatgtgaaggtggacagctgccctgaggagccccagctgaggatgaagaacaatgaggaggctgaggactatgatgatgacctgactgactctgagatggatgtggtgaggtttgatgatgacaacagccccagcttcatccagatcaggtctgtggccaagaagcaccccaagacctgggtgcactacattgctgctgaggaggaggactgggactatgcccccctggtgctggcccctgatgacaggagctacaagagccagtacctgaacaatggcccccagaggattggcaggaagtacaagaaggtcaggttcatggcctacactgatgaaaccttcaagaccagggaggccatccagcatgagtctggcatcctgggccccctgctgtatggggaggtgggggacaccctgctgatcatcttcaagaaccaggccagcaggccctacaacatctacccccatggcatcactgatgtgaggcccctgtacagcaggaggctgcccaagggggtgaagcacctgaaggacttccccatcctgcctggggagatcttcaagtacaagtggactgtgactgtggaggatggccccaccaagtctgaccccaggtgcctgaccagatactacagcagctttgtgaacatggagagggacctggcctctggcctgattggccccctgctgatctgctacaaggagtctgtggaccagaggggcaaccagatcatgtctgacaagaggaatgtgatcctgttctctgtgtttgatgagaacaggagctggtacctgactgagaacatccagaggttcctgcccaaccctgctggggtgcagctggaggaccctgagttccaggccagcaacatcatgcacagcatcaatggctatgtgtttgacagcctgcagctgtctgtgtgcctgcatgaggtggcctactggtacatcctgagcattggggcccagactgacttcctgtctgtgttcttctctggctacaccttcaagcacaagatggtgtatgaggacaccctgaccctgttccccttctctggggagactgtgttcatgagcatggagaaccctggcctgtggattctgggctgccacaactctgacttcaggaacaggggcatgactgccctgctgaaagtctccagctgtgacaagaacactggggactactatgaggacagctatgaggacatctctgcctacctgctgagcaagaacaatgccattgagcccaggagcttcagccagaatagcaggcaccccagcaccaggcagaagcagttcaatgccaccaccatcccagagaataccaccctgcagtctgaccaggaggagattgactatgatgacaccatctctgtggagatgaagaaggaggactttgacatctacgacgaggacgagaaccagagccccaggagcttccagaagaagaccaggcactacttcattgctgctgtggagaggctgtgggactatggcatgagcagcagcccccatgtgctgaggaacagggcccagtctggctctgtgccccagttcaagaaggtggtgttccaggagttcactgatggcagcttcacccagcccctgtacagaggggagctgaatgagcacctgggcctgctgggcccctacatcagggctgaggtggaggacaacatcatggtgaccttcaggaaccaggccagcaggccctacagcttctacagcagcctgatcagctatgaggaggaccagaggcagggggctgagcccaggaagaactttgtgaagcccaatgaaaccaagacctacttctggaaggtgcagcaccacatggcccccaccaaggatgagtttgactgcaaggcctgggcctacttctctgatgtggacctggagaaggatgtgcactctggcctgattggccccctgctggtgtgccacaccaacaccctgaaccctgcccatggcaggcaggtgactgtgcaggagtttgccctgttcttcaccatctttgatgaaaccaagagctggtacttcactgagaacatggagaggaactgcagggccccctgcaacatccagatggaggaccccaccttcaaggagaactacaggttccatgccatcaatggctacatcatggacaccctgcctggcctggtgatggcccaggaccagaggatcaggtggtacctgctgagcatgggcagcaatgagaacatccacagcatccacttctctggccatgtgttcactgtgaggaagaaggaggagtacaagatggccctgtacaacctgtaccctggggtgtttgagactgtggagatgctgcccagcaaggctggcatctggagggtggagtgcctgattggggagcacctgcatgctggcatgagcaccctgttcctggtgtacagcaacaagtgccagacccccctgggcatggcctctggccacatcagggacttccagatcactgcctctggccagtatggccagtgggcccccaagctggccaggctgcactactctggcagcatcaatgcctggagcaccaaggagcccttcagctggatcaaggtggacctgctggcccccatgatcatccatggcatcaagacccagggggccaggcagaagttcagcagcctgtacatcagccagttcatcatcatgtacagcctggatggcaagaagtggcagacctacaggggcaacagcactggcaccctgatggtgttctttggcaatgtggacagctctggcatcaagcacaacatcttcaacccccccatcattgccagatacatcaggctgcaccccacccactacagcatcaggagcaccctgaggatggagctgatgggctgtgacctgaacagctgcagcatgcccctgggcatggagagcaaggccatctctgatgcccagatcactgccagcagctacttcaccaacatgtttgccacctggagccccagcaaggccaggctgcacctgcagggcaggagcaatgcctggaggccccaggtcaacaaccccaaggagtggctgcaggtggacttccagaagaccatgaaggtgactggggtgaccacccagggggtgaagagcctgctgaccagcatgtatgtgaaggagttcctgatcagcagcagccaggatggccaccagtggaccctgttcttccagaatggcaaggtgaaggtgttccagggcaaccaggacagcttcacccctgtggtgaacagcctggacccccccctgctgaccagatacctgaggattcacccccagagctgggtgcaccagattgccctgaggatggaggtgctgggctgtgaggcccaggacctgtactga

SEQ ID NO: 111 - DNA, 4642 bp, Artificial Sequence
  Description of Artificial Sequence: Synthetic polynucleotide
atgcagattgagctgagcacctgcttcttcctgtgcctgctgaggttctgcttctctgccaccaggagatactacctgggggctgtggagctgagctgggactacatgcagtctgacctgggggagctgcctgtggatgccaggtaaaggcatgtcctgtagggtctgatcggggccaggattgtggggatgttatgattcttatcatatggcacctaatgtatcagttgagttgtgaaaacagtgtttcggtttaatggatgttagggatttatatacaacttcaaatttgcctccttgctaatagtagaaaagagtagtatggaagcattacttccagctgctttttgaagtgtccaccaaaatgaacgactttttcctttcttcacgcaggttcccccccagagtgcccaagagcttccccttcaacacctctgtggtgtacaagaagaccctgtttgtggagttcactgaccacctgttcaacattgccaagcccaggcccccctggatgggcctgctgggccccaccatccaggctgaggtgtatgacactgtggtgatcaccctgaagaacatggccagccaccctgtgagcctgcatgctgtgggggtgagctactggaaggcctctgagggggctgagtatgatgaccagaccagccagagggagaaggaggatgacaaggtgttccctgggggcagccacacctatgtgtggcaggtgctgaaggagaatggccccatggcctctgaccccctgtgcctgacctacagctacctgagccatgtggacctggtgaaggacctgaactctggcctgattggggccctgctggtgtgcagggagggcagcctggccaaggagaagacccagaccctgcacaagttcatcctgctgtttgctgtgtttgatgagggcaagagctggcactctgaaaccaagaacagcctgatgcaggacagggatgctgcctctgccagggcctggcccaagatgcacactgtgaatggctatgtgaacaggagcctgcctggcctgattggctgccacaggaagtctgtgtactggcatgtgattggcatgggcaccacccctgaggtgcacagcatcttcctggagggccacaccttcctggtcaggaaccacaggcaggccagcctggagatcagccccatcaccttcctgactgcccagaccctgctgatggacctgggccagttcctgctgagctgccacatcagcagccaccagcatgatggcatggaggcctatgtgaaggtggacagctgccctgaggagccccagctgaggatgaagaacaatgaggaggctgaggactatgatgatgacctgactgactctgagatggatgtggtgaggtttgatgatgacaacagccccagcttcatccagatcaggtctgtggccaagaagcaccccaagacctgggtgcactacattgctgctgaggaggaggactgggactatgcccccctggtgctggcccctgatgacaggagctacaagagccagtacctgaacaatggcccccagaggattggcaggaagtacaagaaggtcaggttcatggcctacactgatgaaaccttcaagaccagggaggccatccagcatgagtctggcatcctgggccccctgctgtatggggaggtgggggacaccctgctgatcatcttcaagaaccaggccagcaggccctacaacatctacccccatggcatcactgatgtgaggcccctgtacagcaggaggctgcccaagggggtgaagcacctgaaggacttccccatcctgcctggggagatcttcaagtacaagtggactgtgactgtggaggatggccccaccaagtctgaccccaggtgcctgaccagatactacagcagctttgtgaacatggagagggacctggcctctggcctgattggccccctgctgatctgctacaaggagtctgtggaccagaggggcaaccagatcatgtctgacaagaggaatgtgatcctgttctctgtgtttgatgagaacaggagctggtacctgactgagaacatccagaggttcctgcccaaccctgctggggtgcagctggaggaccctgagttccaggccagcaacatcatgcacagcatcaatggctatgtgtttgacagcctgcagctgtctgtgtgcctgcatgaggtggcctactggtacatcctgagcattggggcccagactgacttcctgtctgtgttcttctctggctacaccttcaagcacaagatggtgtatgaggacaccctgaccctgttccccttctctggggagactgtgttcatgagcatggagaaccctggcctgtggattctgggctgccacaactctgacttcaggaacaggggcatgactgccctgctgaaagtctccagctgtgacaagaacactggggactactatgaggacagctatgaggacatctctgcctacctgctgagcaagaacaatgccattgagcccaggagcttcagccagaatagcaggcaccccagcaccaggcagaagcagttcaatgccaccaccatcccagagaataccaccctgcagtctgaccaggaggagattgactatgatgacaccatctctgtggagatgaagaaggaggactttgacatctacgacgaggacgagaaccagagccccaggagcttccagaagaagaccaggcactacttcattgctgctgtggagaggctgtgggactatggcatgagcagcagcccccatgtgctgaggaacagggcccagtctggctctgtgccccagttcaagaaggtggtgttccaggagttcactgatggcagcttcacccagcccctgtacagaggggagctgaatgagcacctgggcctgctgggcccctacatcagggctgaggtggaggacaacatcatggtgaccttcaggaaccaggccagcaggccctacagcttctacagcagcctgatcagctatgaggaggaccagaggcagggggctgagcccaggaagaactttgtgaagcccaatgaaaccaagacctacttctggaaggtgcagcaccacatggcccccaccaaggatgagtttgactgcaaggcctgggcctacttctctgatgtggacctggagaaggatgtgcactctggcctgattggccccctgctggtgtgccacaccaacaccctgaaccctgcccatggcaggcaggtgactgtgcaggagtttgccctgttcttcaccatctttgatgaaaccaagagctggtacttcactgagaacatggagaggaactgcagggccccctgcaacatccagatggaggaccccaccttcaaggagaactacaggttccatgccatcaatggctacatcatggacaccctgcctggcctggtgatggcccaggaccagaggatcaggtggtacctgctgagcatgggcagcaatgagaacatccacagcatccacttctctggccatgtgttcactgtgaggaagaaggaggagtacaagatggccctgtacaacctgtaccctggggtgtttgagactgtggagatgctgcccagcaaggctggcatctggagggtggagtgcctgattggggagcacctgcatgctggcatgagcaccctgttcctggtgtacagcaacaagtgccagacccccctgggcatggcctctggccacatcagggacttccagatcactgcctctggccagtatggccagtgggcccccaagctggccaggctgcactactctggcagcatcaatgcctggagcaccaaggagcccttcagctggatcaaggtggacctgctggcccccatgatcatccatggcatcaagacccagggggccaggcagaagttcagcagcctgtacatcagccagttcatcatcatgtacagcctggatggcaagaagtggcagacctacaggggcaacagcactggcaccctgatggtgttctttggcaatgtggacagctctggcatcaagcacaacatcttcaacccccccatcattgccagatacatcaggctgcaccccacccactacagcatcaggagcaccctgaggatggagctgatgggctgtgacctgaacagctgcagcatgcccctgggcatggagagcaaggccatctctgatgcccagatcactgccagcagctacttcaccaacatgtttgccacctggagccccagcaaggccaggctgcacctgcagggcaggagcaatgcctggaggccccaggtcaacaaccccaaggagtggctgcaggtggacttccagaagaccatgaaggtgactggggtgaccacccagggggtgaagagcctgctgaccagcatgtatgtgaaggagttcctgatcagcagcagccaggatggccaccagtggaccctgttcttccagaatggcaaggtgaaggtgttccagggcaaccaggacagcttcacccctgtggtgaacagcctggacccccccctgctgaccagatacctgaggattcacccccagagctgggtgcaccagattgccctgaggatggaggtgctgggctgtgaggcccaggacctgtactga

SEQ ID NO: 112 - DNA, 4792 bp, Artificial Sequence
  Description of Artificial Sequence: Synthetic polynucleotide
atgcagattgagctgagcacctgcttcttcctgtgcctgctgaggttctgcttctctgccaccaggagatactacctgggggctgtggagctgagctgggactacatgcagtctgacctgggggagctgcctgtggatgccaggtaaaggcatgtcctgtagggtctgatcggggccaggattgtggggatgtaagtctgcttggaggaaggtgcagacatcgggttaggatggttgtgatgctacctgggccccaaagaaacatttctgggtaaggtgtgcacacatctgtgttattagcagaaatgctaactgccaattcttttcataggtctgacctatttatgattcttatcatatggcacctaatgtatcagttgagttgtgaaaacagtgtttcggtttaatggatgttagggatttatatacaacttcaaatttgcctccttgctaatagtagaaaagagtagtatggaagcattacttccagctgctttttgaagtgtccaccaaaatgaacgactttttcctttcttcacgcaggttcccccccagagtgcccaagagcttccccttcaacacctctgtggtgtacaagaagaccctgtttgtggagttcactgaccacctgttcaacattgccaagcccaggcccccctggatgggcctgctgggccccaccatccaggctgaggtgtatgacactgtggtgatcaccctgaagaacatggccagccaccctgtgagcctgcatgctgtgggggtgagctactggaaggcctctgagggggctgagtatgatgaccagaccagccagagggagaaggaggatgacaaggtgttccctgggggcagccacacctatgtgtggcaggtgctgaaggagaatggccccatggcctctgaccccctgtgcctgacctacagctacctgagccatgtggacctggtgaaggacctgaactctggcctgattggggccctgctggtgtgcagggagggcagcctggccaaggagaagacccagaccctgcacaagttcatcctgctgtttgctgtgtttgatgagggcaagagctggcactctgaaaccaagaacagcctgatgcaggacagggatgctgcctctgccagggcctggcccaagatgcacactgtgaatggctatgtgaacaggagcctgcctggcctgattggctgccacaggaagtctgtgtactggcatgtgattggcatgggcaccacccctgaggtgcacagcatcttcctggagggccacaccttcctggtcaggaaccacaggcaggccagcctggagatcagccccatcaccttcctgactgcccagaccctgctgatggacctgggccagttcctgctgagctgccacatcagcagccaccagcatgatggcatggaggcctatgtgaaggtggacagctgccctgaggagccccagctgaggatgaagaacaatgaggaggctgaggactatgatgatgacctgactgactctgagatggatgtggtgaggtttgatgatgacaacagccccagcttcatccagatcaggtctgtggccaagaagcaccccaagacctgggtgcactacattgctgctgaggaggaggactgggactatgcccccctggtgctggcccctgatgacaggagctacaagagccagtacctgaacaatggcccccagaggattggcaggaagtacaagaaggtcaggttcatggcctacactgatgaaaccttcaagaccagggaggccatccagcatgagtctggcatcctgggccccctgctgtatggggaggtgggggacaccctgctgatcatcttcaagaaccaggccagcaggccctacaacatctacccccatggcatcactgatgtgaggcccctgtacagcaggaggctgcccaagggggtgaagcacctgaaggacttccccatcctgcctggggagatcttcaagtacaagtggactgtgactgtggaggatggccccaccaagtctgaccccaggtgcctgaccagatactacagcagctttgtgaacatggagagggacctggcctctggcctgattggccccctgctgatctgctacaaggagtctgtggaccagaggggcaaccagatcatgtctgacaagaggaatgtgatcctgttctctgtgtttgatgagaacaggagctggtacctgactgagaacatccagaggttcctgcccaaccctgctggggtgcagctggaggaccctgagttccaggccagcaacatcatgcacagcatcaatggctatgtgtttgacagcctgcagctgtctgtgtgcctgcatgaggtggcctactggtacatcctgagcattggggcccagactgacttcctgtctgtgttcttctctggctacaccttcaagcacaagatggtgtatgaggacaccctgaccctgttccccttctctggggagactgtgttcatgagcatggagaaccctggcctgtggattctgggctgccacaactctgacttcaggaacaggggcatgactgccctgctgaaagtctccagctgtgacaagaacactggggactactatgaggacagctatgaggacatctctgcctacctgctgagcaagaacaatgccattgagcccaggagcttcagccagaatagcaggcaccccagcaccaggcagaagcagttcaatgccaccaccatcccagagaataccaccctgcagtctgaccaggaggagattgactatgatgacaccatctctgtggagatgaagaaggaggactttgacatctacgacgaggacgagaaccagagccccaggagcttccagaagaagaccaggcactacttcattgctgctgtggagaggctgtgggactatggcatgagcagcagcccccatgtgctgaggaacagggcccagtctggctctgtgccccagttcaagaaggtggtgttccaggagttcactgatggcagcttcacccagcccctgtacagaggggagctgaatgagcacctgggcctgctgggcccctacatcagggctgaggtggaggacaacatcatggtgaccttcaggaaccaggccagcaggccctacagcttctacagcagcctgatcagctatgaggaggaccagaggcagggggctgagcccaggaagaactttgtgaagcccaatgaaaccaagacctacttctggaaggtgcagcaccacatggcccccaccaaggatgagtttgactgcaaggcctgggcctacttctctgatgtggacctggagaaggatgtgcactctggcctgattggccccctgctggtgtgccacaccaacaccctgaaccctgcccatggcaggcaggtgactgtgcaggagtttgccctgttcttcaccatctttgatgaaaccaagagctggtacttcactgagaacatggagaggaactgcagggccccctgcaacatccagatggaggaccccaccttcaaggagaactacaggttccatgccatcaatggctacatcatggacaccctgcctggcctggtgatggcccaggaccagaggatcaggtggtacctgctgagcatgggcagcaatgagaacatccacagcatccacttctctggccatgtgttcactgtgaggaagaaggaggagtacaagatggccctgtacaacctgtaccctggggtgtttgagactgtggagatgctgcccagcaaggctggcatctggagggtggagtgcctgattggggagcacctgcatgctggcatgagcaccctgttcctggtgtacagcaacaagtgccagacccccctgggcatggcctctggccacatcagggacttccagatcactgcctctggccagtatggccagtgggcccccaagctggccaggctgcactactctggcagcatcaatgcctggagcaccaaggagcccttcagctggatcaaggtggacctgctggcccccatgatcatccatggcatcaagacccagggggccaggcagaagttcagcagcctgtacatcagccagttcatcatcatgtacagcctggatggcaagaagtggcagacctacaggggcaacagcactggcaccctgatggtgttctttggcaatgtggacagctctggcatcaagcacaacatcttcaacccccccatcattgccagatacatcaggctgcaccccacccactacagcatcaggagcaccctgaggatggagctgatgggctgtgacctgaacagctgcagcatgcccctgggcatggagagcaaggccatctctgatgcccagatcactgccagcagctacttcaccaacatgtttgccacctggagccccagcaaggccaggctgcacctgcagggcaggagcaatgcctggaggccccaggtcaacaaccccaaggagtggctgcaggtggacttccagaagaccatgaaggtgactggggtgaccacccagggggtgaagagcctgctgaccagcatgtatgtgaaggagttcctgatcagcagcagccaggatggccaccagtggaccctgttcttccagaatggcaaggtgaaggtgttccagggcaaccaggacagcttcacccctgtggtgaacagcctggacccccccctgctgaccagatacctgaggattcacccccagagctgggtgcaccagattgccctgaggatggaggtgctgggctgtgaggcccaggacctgtactga

SEQ ID NO: 113 - DNA, 5392 bp, Artificial Sequence
  Description of Artificial Sequence: Synthetic polynucleotide
atgcagattgagctgagcacctgcttcttcctgtgcctgctgaggttctgcttctctgccaccaggagatactacctgggggctgtggagctgagctgggactacatgcagtctgacctgggggagctgcctgtggatgccaggtaaaggcatgtcctgtagggtctgatcggggccaggattgtggggatgtaagtctgcttggaggaaggtgcagacatcgggttaggatggttgtgatgctacctgggccccaaagaaacatttctgggtaaggtgtgcacacatctgtgttattagcagaaatgctaactgccaattcttttcataggtctgacctatttgttgatattttgttctgttttgtccattgcttctcttcgtcatatgctgctcctccagaatctagagactggagtagagggagggtgaagggacaaagacaaaacttccctctgcctgcccaagcttccatagagagaatcaaggcaatgaaatccaatcaatatcacacacaagtttcatgtctggttctcttgtgtgtacatgcaatgtgtgtttttataatatcttttcctactttgggtgtaaggataatatgagccttgagttcagaagcttttcgtgttttgggggttctggttgagtaattgggagtatctgagtggagacaagaatgaacattaatgtaggactgattctgaattacagcttctggcactagtaggtttcaatatacatagtctgctgaaaggtaattttctctgtgatattcctggtatccctaaggagggaagtataattttaggtacatactgacaaaatttgaacacaaggtacttagatgaaagttatagtctgttttagagatgaaattgaaggatgcagtagctattgctttggcaaaggatttttggctgatgcagtgtatggttattgattttatgattcttatcatatggcacctaatgtatcagttgagttgtgaaaacagtgtttcggtttaatggatgttagggatttatatacaacttcaaatttgcctccttgctaatagtagaaaagagtagtatggaagcattacttccagctgctttttgaagtgtccaccaaaatgaacgactttttcctttcttcacgcaggttcccccccagagtgcccaagagcttccccttcaacacctctgtggtgtacaagaagaccctgtttgtggagttcactgaccacctgttcaacattgccaagcccaggcccccctggatgggcctgctgggccccaccatccaggctgaggtgtatgacactgtggtgatcaccctgaagaacatggccagccaccctgtgagcctgcatgctgtgggggtgagctactggaaggcctctgagggggctgagtatgatgaccagaccagccagagggagaaggaggatgacaaggtgttccctgggggcagccacacctatgtgtggcaggtgctgaaggagaatggccccatggcctctgaccccctgtgcctgacctacagctacctgagccatgtggacctggtgaaggacctgaactctggcctgattggggccctgctggtgtgcagggagggcagcctggccaaggagaagacccagaccctgcacaagttcatcctgctgtttgctgtgtttgatgagggcaagagctggcactctgaaaccaagaacagcctgatgcaggacagggatgctgcctctgccagggcctggcccaagatgcacactgtgaatggctatgtgaacaggagcctgcctggcctgattggctgccacaggaagtctgtgtactggcatgtgattggcatgggcaccacccctgaggtgcacagcatcttcctggagggccacaccttcctggtcaggaaccacaggcaggccagcctggagatcagccccatcaccttcctgactgcccagaccctgctgatggacctgggccagttcctgctgagctgccacatcagcagccaccagcatgatggcatggaggcctatgtgaaggtggacagctgccctgaggagccccagctgaggatgaagaacaatgaggaggctgaggactatgatgatgacctgactgactctgagatggatgtggtgaggtttgatgatgacaacagccccagcttcatccagatcaggtctgtggccaagaagcaccccaagacctgggtgcactacattgctgctgaggaggaggactgggactatgcccccctggtgctggcccctgatgacaggagctacaagagccagtacctgaacaatggcccccagaggattggcaggaagtacaagaaggtcaggttcatggcctacactgatgaaaccttcaagaccagggaggccatccagcatgagtctggcatcctgggccccctgctgtatggggaggtgggggacaccctgctgatcatcttcaagaaccaggccagcaggccctacaacatctacccccatggcatcactgatgtgaggcccctgtacagcaggaggctgcccaagggggtgaagcacctgaaggacttccccatcctgcctggggagatcttcaagtacaagtggactgtgactgtggaggatggccccaccaagtctgaccccaggtgcctgaccagatactacagcagctttgtgaacatggagagggacctggcctctggcctgattggccccctgctgatctgctacaaggagtctgtggaccagaggggcaaccagatcatgtctgacaagaggaatgtgatcctgttctctgtgtttgatgagaacaggagctggtacctgactgagaacatccagaggttcctgcccaaccctgctggggtgcagctggaggaccctgagttccaggccagcaacatcatgcacagcatcaatggctatgtgtttgacagcctgcagctgtctgtgtgcctgcatgaggtggcctactggtacatcctgagcattggggcccagactgacttcctgtctgtgttcttctctggctacaccttcaagcacaagatggtgtatgaggacaccctgaccctgttccccttctctggggagactgtgttcatgagcatggagaaccctggcctgtggattctgggctgccacaactctgacttcaggaacaggggcatgactgccctgctgaaagtctccagctgtgacaagaacactggggactactatgaggacagctatgaggacatctctgcctacctgctgagcaagaacaatgccattgagcccaggagcttcagccagaatagcaggcaccccagcaccaggcagaagcagttcaatgccaccaccatcccagagaataccaccctgcagtctgaccaggaggagattgactatgatgacaccatctctgtggagatgaagaaggaggactttgacatctacgacgaggacgagaaccagagccccaggagcttccagaagaagaccaggcactacttcattgctgctgtggagaggctgtgggactatggcatgagcagcagcccccatgtgctgaggaacagggcccagtctggctctgtgccccagttcaagaaggtggtgttccaggagttcactgatggcagcttcacccagcccctgtacagaggggagctgaatgagcacctgggcctgctgggcccctacatcagggctgaggtggaggacaacatcatggtgaccttcaggaaccaggccagcaggccctacagcttctacagcagcctgatcagctatgaggaggaccagaggcagggggctgagcccaggaagaactttgtgaagcccaatgaaaccaagacctacttctggaaggtgcagcaccacatggcccccaccaaggatgagtttgactgcaaggcctgggcctacttctctgatgtggacctggagaaggatgtgcactctggcctgattggccccctgctggtgtgccacaccaacaccctgaaccctgcccatggcaggcaggtgactgtgcaggagtttgccctgttcttcaccatctttgatgaaaccaagagctggtacttcactgagaacatggagaggaactgcagggccccctgcaacatccagatggaggaccccaccttcaaggagaactacaggttccatgccatcaatggctacatcatggacaccctgcctggcctggtgatggcccaggaccagaggatcaggtggtacctgctgagcatgggcagcaatgagaacatccacagcatccacttctctggccatgtgttcactgtgaggaagaaggaggagtacaagatggccctgtacaacctgtaccctggggtgtttgagactgtggagatgctgcccagcaaggctggcatctggagggtggagtgcctgattggggagcacctgcatgctggcatgagcaccctgttcctggtgtacagcaacaagtgccagacccccctgggcatggcctctggccacatcagggacttccagatcactgcctctggccagtatggccagtgggcccccaagctggccaggctgcactactctggcagcatcaatgcctggagcaccaaggagcccttcagctggatcaaggtggacctgctggcccccatgatcatccatggcatcaagacccagggggccaggcagaagttcagcagcctgtacatcagccagttcatcatcatgtacagcctggatggcaagaagtggcagacctacaggggcaacagcactggcaccctgatggtgttctttggcaatgtggacagctctggcatcaagcacaacatcttcaacccccccatcattgccagatacatcaggctgcaccccacccactacagcatcaggagcaccctgaggatggagctgatgggctgtgacctgaacagctgcagcatgcccctgggcatggagagcaaggccatctctgatgcccagatcactgccagcagctacttcaccaacatgtttgccacctggagccccagcaaggccaggctgcacctgcagggcaggagcaatgcctggaggccccaggtcaacaaccccaaggagtggctgcaggtggacttccagaagaccatgaaggtgactggggtgaccacccagggggtgaagagcctgctgaccagcatgtatgtgaaggagttcctgatcagcagcagccaggatggccaccagtggaccctgttcttccagaatggcaaggtgaaggtgttccagggcaaccaggacagcttcacccctgtggtgaacagcctggacccccccctgctgaccagatacctgaggattcacccccagagctgggtgcaccagattgccctgaggatggaggtgctgggctgtgaggcccaggacctgtactga

SEQ ID NO: 114 - DNA, 4522 bp, Artificial Sequence
  Description of Artificial Sequence: Synthetic polynucleotide
atgcagattgagctgagcacctgcttcttcctgtgcctgctgaggttctgcttctctgccaccaggagatactacctgggggctgtggagctgagctgggactacatgcagtctgacctgggggagctgcctgtggatgccaggttggtatcaaggttacaagacaggtttaaggagaccaatagaaactgggcatgtggagacagagaagactcttgggtttctgataggcactgactctctctgcctattggtctattttcccacccttaggttcccccccagagtgcccaagagcttccccttcaacacctctgtggtgtacaagaagaccctgtttgtggagttcactgaccacctgttcaacattgccaagcccaggcccccctggatgggcctgctgggccccaccatccaggctgaggtgtatgacactgtggtgatcaccctgaagaacatggccagccaccctgtgagcctgcatgctgtgggggtgagctactggaaggcctctgagggggctgagtatgatgaccagaccagccagagggagaaggaggatgacaaggtgttccctgggggcagccacacctatgtgtggcaggtgctgaaggagaatggccccatggcctctgaccccctgtgcctgacctacagctacctgagccatgtggacctggtgaaggacctgaactctggcctgattggggccctgctggtgtgcagggagggcagcctggccaaggagaagacccagaccctgcacaagttcatcctgctgtttgctgtgtttgatgagggcaagagctggcactctgaaaccaagaacagcctgatgcaggacagggatgctgcctctgccagggcctggcccaagatgcacactgtgaatggctatgtgaacaggagcctgcctggcctgattggctgccacaggaagtctgtgtactggcatgtgattggcatgggcaccacccctgaggtgcacagcatcttcctggagggccacaccttcctggtcaggaaccacaggcaggccagcctggagatcagccccatcaccttcctgactgcccagaccctgctgatggacctgggccagttcctgctgagctgccacatcagcagccaccagcatgatggcatggaggcctatgtgaaggtggacagctgccctgaggagccccagctgaggatgaagaacaatgaggaggctgaggactatgatgatgacctgactgactctgagatggatgtggtgaggtttgatgatgacaacagccccagcttcatccagatcaggtctgtggccaagaagcaccccaagacctgggtgcactacattgctgctgaggaggaggactgggactatgcccccctggtgctggcccctgatgacaggagctacaagagccagtacctgaacaatggcccccagaggattggcaggaagtacaagaaggtcaggttcatggcctacactgatgaaaccttcaagaccagggaggccatccagcatgagtctggcatcctgggccccctgctgtatggggaggtgggggacaccctgctgatcatcttcaagaaccaggccagcaggccctacaacatctacccccatggcatcactgatgtgaggcccctgtacagcaggaggctgcccaagggggtgaagcacctgaaggacttccccatcctgcctggggagatcttcaagtacaagtggactgtgactgtggaggatggccccaccaagtctgaccccaggtgcctgaccagatactacagcagctttgtgaacatggagagggacctggcctctggcctgattggccccctgctgatctgctacaaggagtctgtggaccagaggggcaaccagatcatgtctgacaagaggaatgtgatcctgttctctgtgtttgatgagaacaggagctggtacctgactgagaacatccagaggttcctgcccaaccctgctggggtgcagctggaggaccctgagttccaggccagcaacatcatgcacagcatcaatggctatgtgtttgacagcctgcagctgtctgtgtgcctgcatgaggtggcctactggtacatcctgagcattggggcccagactgacttcctgtctgtgttcttctctggctacaccttcaagcacaagatggtgtatgaggacaccctgaccctgttccccttctctggggagactgtgttcatgagcatggagaaccctggcctgtggattctgggctgccacaactctgacttcaggaacaggggcatgactgccctgctgaaagtctccagctgtgacaagaacactggggactactatgaggacagctatgaggacatctctgcctacctgctgagcaagaacaatgccattgagcccaggagcttcagccagaatagcaggcaccccagcaccaggcagaagcagttcaatgccaccaccatcccagagaataccaccctgcagtctgaccaggaggagattgactatgatgacaccatctctgtggagatgaagaaggaggactttgacatctacgacgaggacgagaaccagagccccaggagcttccagaagaagaccaggcactacttcattgctgctgtggagaggctgtgggactatggcatgagcagcagcccccatgtgctgaggaacagggcccagtctggctctgtgccccagttcaagaaggtggtgttccaggagttcactgatggcagcttcacccagcccctgtacagaggggagctgaatgagcacctgggcctgctgggcccctacatcagggctgaggtggaggacaacatcatggtgaccttcaggaaccaggccagcaggccctacagcttctacagcagcctgatcagctatgaggaggaccagaggcagggggctgagcccaggaagaactttgtgaagcccaatgaaaccaagacctacttctggaaggtgcagcaccacatggcccccaccaaggatgagtttgactgcaaggcctgggcctacttctctgatgtggacctggagaaggatgtgcactctggcctgattggccccctgctggtgtgccacaccaacaccctgaaccctgcccatggcaggcaggtgactgtgcaggagtttgccctgttcttcaccatctttgatgaaaccaagagctggtacttcactgagaacatggagaggaactgcagggccccctgcaacatccagatggaggaccccaccttcaaggagaactacaggttccatgccatcaatggctacatcatggacaccctgcctggcctggtgatggcccaggaccagaggatcaggtggtacctgctgagcatgggcagcaatgagaacatccacagcatccacttctctggccatgtgttcactgtgaggaagaaggaggagtacaagatggccctgtacaacctgtaccctggggtgtttgagactgtggagatgctgcccagcaaggctggcatctggagggtggagtgcctgattggggagcacctgcatgctggcatgagcaccctgttcctggtgtacagcaacaagtgccagacccccctgggcatggcctctggccacatcagggacttccagatcactgcctctggccagtatggccagtgggcccccaagctggccaggctgcactactctggcagcatcaatgcctggagcaccaaggagcccttcagctggatcaaggtggacctgctggcccccatgatcatccatggcatcaagacccagggggccaggcagaagttcagcagcctgtacatcagccagttcatcatcatgtacagcctggatggcaagaagtggcagacctacaggggcaacagcactggcaccctgatggtgttctttggcaatgtggacagctctggcatcaagcacaacatcttcaacccccccatcattgccagatacatcaggctgcaccccacccactacagcatcaggagcaccctgaggatggagctgatgggctgtgacctgaacagctgcagcatgcccctgggcatggagagcaaggccatctctgatgcccagatcactgccagcagctacttcaccaacatgtttgccacctggagccccagcaaggccaggctgcacctgcagggcaggagcaatgcctggaggccccaggtcaacaaccccaaggagtggctgcaggtggacttccagaagaccatgaaggtgactggggtgaccacccagggggtgaagagcctgctgaccagcatgtatgtgaaggagttcctgatcagcagcagccaggatggccaccagtggaccctgttcttccagaatggcaaggtgaaggtgttccagggcaaccaggacagcttcacccctgtggtgaacagcctggacccccccctgctgaccagatacctgaggattcacccccagagctgggtgcaccagattgccctgaggatggaggtgctgggctgtgaggcccaggacctgtactga

SEQ ID NO: 115 - DNA, 4909 bp, Artificial Sequence
  Description of Artificial Sequence: Synthetic polynucleotide
atgcagattgagctgagcacctgcttcttcctgtgcctgctgaggttctgcttctctgccaccaggagatactacctgggggctgtggagctgagctgggactacatgcagtctgacctgggggagctgcctgtggatgccaggtaaaggcatgtcctgtagggtctgatcggggccaggattgtggggatgtaagtctgcttggaggaaggtgcagacatcgggttaggatggttgtgatgctacctgggccccaaagaaacatttctgggtaaggtgtgcacacatctgtgttattagcagaaatgctaactgccaattcttttcataggtctgacctattccctaaaatgggcaaacattgcaagcagcaaacagcaaacacacagccctccctgcctgctgaccttggagctggggcagaggtcagagacctctctgggcccatgccacctccaactatgattcttatcatatggcacctaatgtatcagttgagttgtgaaaacagtgtttcggtttaatggatgttagggatttatatacaacttcaaatttgcctccttgctaatagtagaaaagagtagtatggaagcattacttccagctgctttttgaagtgtccaccaaaatgaacgactttttcctttcttcacgcaggttcccccccagagtgcccaagagcttccccttcaacacctctgtggtgtacaagaagaccctgtttgtggagttcactgaccacctgttcaacattgccaagcccaggcccccctggatgggcctgctgggccccaccatccaggctgaggtgtatgacactgtggtgatcaccctgaagaacatggccagccaccctgtgagcctgcatgctgtgggggtgagctactggaaggcctctgagggggctgagtatgatgaccagaccagccagagggagaaggaggatgacaaggtgttccctgggggcagccacacctatgtgtggcaggtgctgaaggagaatggccccatggcctctgaccccctgtgcctgacctacagctacctgagccatgtggacctggtgaaggacctgaactctggcctgattggggccctgctggtgtgcagggagggcagcctggccaaggagaagacccagaccctgcacaagttcatcctgctgtttgctgtgtttgatgagggcaagagctggcactctgaaaccaagaacagcctgatgcaggacagggatgctgcctctgccagggcctggcccaagatgcacactgtgaatggctatgtgaacaggagcctgcctggcctgattggctgccacaggaagtctgtgtactggcatgtgattggcatgggcaccacccctgaggtgcacagcatcttcctggagggccacaccttcctggtcaggaaccacaggcaggccagcctggagatcagccccatcaccttcctgactgcccagaccctgctgatggacctgggccagttcctgctgagctgccacatcagcagccaccagcatgatggcatggaggcctatgtgaaggtggacagctgccctgaggagccccagctgaggatgaagaacaatgaggaggctgaggactatgatgatgacctgactgactctgagatggatgtggtgaggtttgatgatgacaacagccccagcttcatccagatcaggtctgtggccaagaagcaccccaagacctgggtgcactacattgctgctgaggaggaggactgggactatgcccccctggtgctggcccctgatgacaggagctacaagagccagtacctgaacaatggcccccagaggattggcaggaagtacaagaaggtcaggttcatggcctacactgatgaaaccttcaagaccagggaggccatccagcatgagtctggcatcctgggccccctgctgtatggggaggtgggggacaccctgctgatcatcttcaagaaccaggccagcaggccctacaacatctacccccatggcatcactgatgtgaggcccctgtacagcaggaggctgcccaagggggtgaagcacctgaaggacttccccatcctgcctggggagatcttcaagtacaagtggactgtgactgtggaggatggccccaccaagtctgaccccaggtgcctgaccagatactacagcagctttgtgaacatggagagggacctggcctctggcctgattggccccctgctgatctgctacaaggagtctgtggaccagaggggcaaccagatcatgtctgacaagaggaatgtgatcctgttctctgtgtttgatgagaacaggagctggtacctgactgagaacatccagaggttcctgcccaaccctgctggggtgcagctggaggaccctgagttccaggccagcaacatcatgcacagcatcaatggctatgtgtttgacagcctgcagctgtctgtgtgcctgcatgaggtggcctactggtacatcctgagcattggggcccagactgacttcctgtctgtgttcttctctggctacaccttcaagcacaagatggtgtatgaggacaccctgaccctgttccccttctctggggagactgtgttcatgagcatggagaaccctggcctgtggattctgggctgccacaactctgacttcaggaacaggggcatgactgccctgctgaaagtctccagctgtgacaagaacactggggactactatgaggacagctatgaggacatctctgcctacctgctgagcaagaacaatgccattgagcccaggagcttcagccagaatagcaggcaccccagcaccaggcagaagcagttcaatgccaccaccatcccagagaataccaccctgcagtctgaccaggaggagattgactatgatgacaccatctctgtggagatgaagaaggaggactttgacatctacgacgaggacgagaaccagagccccaggagcttccagaagaagaccaggcactacttcattgctgctgtggagaggctgtgggactatggcatgagcagcagcccccatgtgctgaggaacagggcccagtctggctctgtgccccagttcaagaaggtggtgttccaggagttcactgatggcagcttcacccagcccctgtacagaggggagctgaatgagcacctgggcctgctgggcccctacatcagggctgaggtggaggacaacatcatggtgaccttcaggaaccaggccagcaggccctacagcttctacagcagcctgatcagctatgaggaggaccagaggcagggggctgagcccaggaagaactttgtgaagcccaatgaaaccaagacctacttctggaaggtgcagcaccacatggcccccaccaaggatgagtttgactgcaaggcctgggcctacttctctgatgtggacctggagaaggatgtgcactctggcctgattggccccctgctggtgtgccacaccaacaccctgaaccctgcccatggcaggcaggtgactgtgcaggagtttgccctgttcttcaccatctttgatgaaaccaagagctggtacttcactgagaacatggagaggaactgcagggccccctgcaacatccagatggaggaccccaccttcaaggagaactacaggttccatgccatcaatggctacatcatggacaccctgcctggcctggtgatggcccaggaccagaggatcaggtggtacctgctgagcatgggcagcaatgagaacatccacagcatccacttctctggccatgtgttcactgtgaggaagaaggaggagtacaagatggccctgtacaacctgtaccctggggtgtttgagactgtggagatgctgcccagcaaggctggcatctggagggtggagtgcctgattggggagcacctgcatgctggcatgagcaccctgttcctggtgtacagcaacaagtgccagacccccctgggcatggcctctggccacatcagggacttccagatcactgcctctggccagtatggccagtgggcccccaagctggccaggctgcactactctggcagcatcaatgcctggagcaccaaggagcccttcagctggatcaaggtggacctgctggcccccatgatcatccatggcatcaagacccagggggccaggcagaagttcagcagcctgtacatcagccagttcatcatcatgtacagcctggatggcaagaagtggcagacctacaggggcaacagcactggcaccctgatggtgttctttggcaatgtggacagctctggcatcaagcacaacatcttcaacccccccatcattgccagatacatcaggctgcaccccacccactacagcatcaggagcaccctgaggatggagctgatgggctgtgacctgaacagctgcagcatgcccctgggcatggagagcaaggccatctctgatgcccagatcactgccagcagctacttcaccaacatgtttgccacctggagccccagcaaggccaggctgcacctgcagggcaggagcaatgcctggaggccccaggtcaacaaccccaaggagtggctgcaggtggacttccagaagaccatgaaggtgactggggtgaccacccagggggtgaagagcctgctgaccagcatgtatgtgaaggagttcctgatcagcagcagccaggatggccaccagtggaccctgttcttccagaatggcaaggtgaaggtgttccagggcaaccaggacagcttcacccctgtggtgaacagcctggacccccccctgctgaccagatacctgaggattcacccccagagctgggtgcaccagattgccctgaggatggaggtgctgggctgtgaggcccaggacctgtactga

SEQ ID NO: 116 - DNA, 4912 bp, Artificial Sequence
  Description of Artificial Sequence: Synthetic polynucleotide
atgcagattgagctgagcacctgcttcttcctgtgcctgctgaggttctgcttctctgccaccaggagatactacctgggggctgtggagctgagctgggactacatgcagtctgacctgggggagctgcctgtggatgccaggtaaaggcatgtcctgtagggtctgatcggggccaggattgtggggatgtaagtctgcttggaggaaggtgcagacatcgggttaggatggttgtgatgctacctgggccccaaagaaacatttctgggtaaggtgtgcacacatctgtgttattagcagaaatgctaactgccaattcttttcataggtctgacctattgcgagaacttgtgcctccccgtgttcctgctctttgtccctctgtcctacttagactaatatttgccttgggtactgcaaacaggaaatgggggagggacaggagtagggcggagggtagtatgattcttatcatatggcacctaatgtatcagttgagttgtgaaaacagtgtttcggtttaatggatgttagggatttatatacaacttcaaatttgcctccttgctaatagtagaaaagagtagtatggaagcattacttccagctgctttttgaagtgtccaccaaaatgaacgactttttcctttcttcacgcaggttcccccccagagtgcccaagagcttccccttcaacacctctgtggtgtacaagaagaccctgtttgtggagttcactgaccacctgttcaacattgccaagcccaggcccccctggatgggcctgctgggccccaccatccaggctgaggtgtatgacactgtggtgatcaccctgaagaacatggccagccaccctgtgagcctgcatgctgtgggggtgagctactggaaggcctctgagggggctgagtatgatgaccagaccagccagagggagaaggaggatgacaaggtgttccctgggggcagccacacctatgtgtggcaggtgctgaaggagaatggccccatggcctctgaccccctgtgcctgacctacagctacctgagccatgtggacctggtgaaggacctgaactctggcctgattggggccctgctggtgtgcagggagggcagcctggccaaggagaagacccagaccctgcacaagttcatcctgctgtttgctgtgtttgatgagggcaagagctggcactctgaaaccaagaacagcctgatgcaggacagggatgctgcctctgccagggcctggcccaagatgcacactgtgaatggctatgtgaacaggagcctgcctggcctgattggctgccacaggaagtctgtgtactggcatgtgattggcatgggcaccacccctgaggtgcacagcatcttcctggagggccacaccttcctggtcaggaaccacaggcaggccagcctggagatcagccccatcaccttcctgactgcccagaccctgctgatggacctgggccagttcctgctgagctgccacatcagcagccaccagcatgatggcatggaggcctatgtgaaggtggacagctgccctgaggagccccagctgaggatgaagaacaatgaggaggctgaggactatgatgatgacctgactgactctgagatggatgtggtgaggtttgatgatgacaacagccccagcttcatccagatcaggtctgtggccaagaagcaccccaagacctgggtgcactacattgctgctgaggaggaggactgggactatgcccccctggtgctggcccctgatgacaggagctacaagagccagtacctgaacaatggcccccagaggattggcaggaagtacaagaaggtcaggttcatggcctacactgatgaaaccttcaagaccagggaggccatccagcatgagtctggcatcctgggccccctgctgtatggggaggtgggggacaccctgctgatcatcttcaagaaccaggccagcaggccctacaacatctacccccatggcatcactgatgtgaggcccctgtacagcaggaggctgcccaagggggtgaagcacctgaaggacttccccatcctgcctggggagatcttcaagtacaagtggactgtgactgtggaggatggccccaccaagtctgaccccaggtgcctgaccagatactacagcagctttgtgaacatggagagggacctggcctctggcctgattggccccctgctgatctgctacaaggagtctgtggaccagaggggcaaccagatcatgtctgacaagaggaatgtgatcctgttctctgtgtttgatgagaacaggagctggtacctgactgagaacatccagaggttcctgcccaaccctgctggggtgcagctggaggaccctgagttccaggccagcaacatcatgcacagcatcaatggctatgtgtttgacagcctgcagctgtctgtgtgcctgcatgaggtggcctactggtacatcctgagcattggggcccagactgacttcctgtctgtgttcttctctggctacaccttcaagcacaagatggtgtatgaggacaccctgaccctgttccccttctctggggagactgtgttcatgagcatggagaaccctggcctgtggattctgggctgccacaactctgacttcaggaacaggggcatgactgccctgctgaaagtctccagctgtgacaagaacactggggactactatgaggacagctatgaggacatctctgcctacctgctgagcaagaacaatgccattgagcccaggagcttcagccagaatagcaggcaccccagcaccaggcagaagcagttcaatgccaccaccatcccagagaataccaccctgcagtctgaccaggaggagattgactatgatgacaccatctctgtggagatgaagaaggaggactttgacatctacgacgaggacgagaaccagagccccaggagcttccagaagaagaccaggcactacttcattgctgctgtggagaggctgtgggactatggcatgagcagcagcccccatgtgctgaggaacagggcccagtctggctctgtgccccagttcaagaaggtggtgttccaggagttcactgatggcagcttcacccagcccctgtacagaggggagctgaatgagcacctgggcctgctgggcccctacatcagggctgaggtggaggacaacatcatggtgaccttcaggaaccaggccagcaggccctacagcttctacagcagcctgatcagctatgaggaggaccagaggcagggggctgagcccaggaagaactttgtgaagcccaatgaaaccaagacctacttctggaaggtgcagcaccacatggcccccaccaaggatgagtttgactgcaaggcctgggcctacttctctgatgtggacctggagaaggatgtgcactctggcctgattggccccctgctggtgtgccacaccaacaccctgaaccctgcccatggcaggcaggtgactgtgcaggagtttgccctgttcttcaccatctttgatgaaaccaagagctggtacttcactgagaacatggagaggaactgcagggccccctgcaacatccagatggaggaccccaccttcaaggagaactacaggttccatgccatcaatggctacatcatggacaccctgcctggcctggtgatggcccaggaccagaggatcaggtggtacctgctgagcatgggcagcaatgagaacatccacagcatccacttctctggccatgtgttcactgtgaggaagaaggaggagtacaagatggccctgtacaacctgtaccctggggtgtttgagactgtggagatgctgcccagcaaggctggcatctggagggtggagtgcctgattggggagcacctgcatgctggcatgagcaccctgttcctggtgtacagcaacaagtgccagacccccctgggcatggcctctggccacatcagggacttccagatcactgcctctggccagtatggccagtgggcccccaagctggccaggctgcactactctggcagcatcaatgcctggagcaccaaggagcccttcagctggatcaaggtggacctgctggcccccatgatcatccatggcatcaagacccagggggccaggcagaagttcagcagcctgtacatcagccagttcatcatcatgtacagcctggatggcaagaagtggcagacctacaggggcaacagcactggcaccctgatggtgttctttggcaatgtggacagctctggcatcaagcacaacatcttcaacccccccatcattgccagatacatcaggctgcaccccacccactacagcatcaggagcaccctgaggatggagctgatgggctgtgacctgaacagctgcagcatgcccctgggcatggagagcaaggccatctctgatgcccagatcactgccagcagctacttcaccaacatgtttgccacctggagccccagcaaggccaggctgcacctgcagggcaggagcaatgcctggaggccccaggtcaacaaccccaaggagtggctgcaggtggacttccagaagaccatgaaggtgactggggtgaccacccagggggtgaagagcctgctgaccagcatgtatgtgaaggagttcctgatcagcagcagccaggatggccaccagtggaccctgttcttccagaatggcaaggtgaaggtgttccagggcaaccaggacagcttcacccctgtggtgaacagcctggacccccccctgctgaccagatacctgaggattcacccccagagctgggtgcaccagattgccctgaggatggaggtgctgggctgtgaggcccaggacctgtactga

SEQ ID NO: 117 - DNA, 4882 bp, Artificial Sequence
  Description of Artificial Sequence: Synthetic polynucleotide
atgcagattgagctgagcacctgcttcttcctgtgcctgctgaggttctgcttctctgccaccaggagatactacctgggggctgtggagctgagctgggactacatgcagtctgacctgggggagctgcctgtggatgccaggtaaaggcatgtcctgtagggtctgatcggggccaggattgtggggatgtaagtctgcttggaggaaggtgcagacatcgggttaggatggttgtgatgctacctgggccccaaagaaacatttctgggtaaggtgtgcacacatctgtgttattagcagaaatgctaactgccaattcttttcataggtctgacctattgttaatcattaacgcttgtactttggtacagttaatcattaacgcttgtactttggtacagttaatcattaacgcttgtactttggtacatatgattcttatcatatggcacctaatgtatcagttgagttgtgaaaacagtgtttcggtttaatggatgttagggatttatatacaacttcaaatttgcctccttgctaatagtagaaaagagtagtatggaagcattacttccagctgctttttgaagtgtccaccaaaatgaacgactttttcctttcttcacgcaggttcccccccagagtgcccaagagcttccccttcaacacctctgtggtgtacaagaagaccctgtttgtggagttcactgaccacctgttcaacattgccaagcccaggcccccctggatgggcctgctgggccccaccatccaggctgaggtgtatgacactgtggtgatcaccctgaagaacatggccagccaccctgtgagcctgcatgctgtgggggtgagctactggaaggcctctgagggggctgagtatgatgaccagaccagccagagggagaaggaggatgacaaggtgttccctgggggcagccacacctatgtgtggcaggtgctgaaggagaatggccccatggcctctgaccccctgtgcctgacctacagctacctgagccatgtggacctggtgaaggacctgaactctggcctgattggggccctgctggtgtgcagggagggcagcctggccaaggagaagacccagaccctgcacaagttcatcctgctgtttgctgtgtttgatgagggcaagagctggcactctgaaaccaagaacagcctgatgcaggacagggatgctgcctctgccagggcctggcccaagatgcacactgtgaatggctatgtgaacaggagcctgcctggcctgattggctgccacaggaagtctgtgtactggcatgtgattggcatgggcaccacccctgaggtgcacagcatcttcctggagggccacaccttcctggtcaggaaccacaggcaggccagcctggagatcagccccatcaccttcctgactgcccagaccctgctgatggacctgggccagttcctgctgagctgccacatcagcagccaccagcatgatggcatggaggcctatgtgaaggtggacagctgccctgaggagccccagctgaggatgaagaacaatgaggaggctgaggactatgatgatgacctgactgactctgagatggatgtggtgaggtttgatgatgacaacagccccagcttcatccagatcaggtctgtggccaagaagcaccccaagacctgggtgcactacattgctgctgaggaggaggactgggactatgcccccctggtgctggcccctgatgacaggagctacaagagccagtacctgaacaatggcccccagaggattggcaggaagtacaagaaggtcaggttcatggcctacactgatgaaaccttcaagaccagggaggccatccagcatgagtctggcatcctgggccccctgctgtatggggaggtgggggacaccctgctgatcatcttcaagaaccaggccagcaggccctacaacatctacccccatggcatcactgatgtgaggcccctgtacagcaggaggctgcccaagggggtgaagcacctgaaggacttccccatcctgcctggggagatcttcaagtacaagtggactgtgactgtggaggatggccccaccaagtctgaccccaggtgcctgaccagatactacagcagctttgtgaacatggagagggacctggcctctggcctgattggccccctgctgatctgctacaaggagtctgtggaccagaggggcaaccagatcatgtctgacaagaggaatgtgatcctgttctctgtgtttgatgagaacaggagctggtacctgactgagaacatccagaggttcctgcccaaccctgctggggtgcagctggaggaccctgagttccaggccagcaacatcatgcacagcatcaatggctatgtgtttgacagcctgcagctgtctgtgtgcctgcatgaggtggcctactggtacatcctgagcattggggcccagactgacttcctgtctgtgttcttctctggctacaccttcaagcacaagatggtgtatgaggacaccctgaccctgttccccttctctggggagactgtgttcatgagcatggagaaccctggcctgtggattctgggctgccacaactctgacttcaggaacaggggcatgactgccctgctgaaagtctccagctgtgacaagaacactggggactactatgaggacagctatgaggacatctctgcctacctgctgagcaagaacaatgccattgagcccaggagcttcagccagaatagcaggcaccccagcaccaggcagaagcagttcaatgccaccaccatcccagagaataccaccctgcagtctgaccaggaggagattgactatgatgacaccatctctgtggagatgaagaaggaggactttgacatctacgacgaggacgagaaccagagccccaggagcttccagaagaagaccaggcactacttcattgctgctgtggagaggctgtgggactatggcatgagcagcagcccccatgtgctgaggaacagggcccagtctggctctgtgccccagttcaagaaggtggtgttccaggagttcactgatggcagcttcacccagcccctgtacagaggggagctgaatgagcacctgggcctgctgggcccctacatcagggctgaggtggaggacaacatcatggtgaccttcaggaaccaggccagcaggccctacagcttctacagcagcctgatcagctatgaggaggaccagaggcagggggctgagcccaggaagaactttgtgaagcccaatgaaaccaagacctacttctggaaggtgcagcaccacatggcccccaccaaggatgagtttgactgcaaggcctgggcctacttctctgatgtggacctggagaaggatgtgcactctggcctgattggccccctgctggtgtgccacaccaacaccctgaaccctgcccatggcaggcaggtgactgtgcaggagtttgccctgttcttcaccatctttgatgaaaccaagagctggtacttcactgagaacatggagaggaactgcagggccccctgcaacatccagatggaggaccccaccttcaaggagaactacaggttccatgccatcaatggctacatcatggacaccctgcctggcctggtgatggcccaggaccagaggatcaggtggtacctgctgagcatgggcagcaatgagaacatccacagcatccacttctctggccatgtgttcactgtgaggaagaaggaggagtacaagatggccctgtacaacctgtaccctggggtgtttgagactgtggagatgctgcccagcaaggctggcatctggagggtggagtgcctgattggggagcacctgcatgctggcatgagcaccctgttcctggtgtacagcaacaagtgccagacccccctgggcatggcctctggccacatcagggacttccagatcactgcctctggccagtatggccagtgggcccccaagctggccaggctgcactactctggcagcatcaatgcctggagcaccaaggagcccttcagctggatcaaggtggacctgctggcccccatgatcatccatggcatcaagacccagggggccaggcagaagttcagcagcctgtacatcagccagttcatcatcatgtacagcctggatggcaagaagtggcagacctacaggggcaacagcactggcaccctgatggtgttctttggcaatgtggacagctctggcatcaagcacaacatcttcaacccccccatcattgccagatacatcaggctgcaccccacccactacagcatcaggagcaccctgaggatggagctgatgggctgtgacctgaacagctgcagcatgcccctgggcatggagagcaaggccatctctgatgcccagatcactgccagcagctacttcaccaacatgtttgccacctggagccccagcaaggccaggctgcacctgcagggcaggagcaatgcctggaggccccaggtcaacaaccccaaggagtggctgcaggtggacttccagaagaccatgaaggtgactggggtgaccacccagggggtgaagagcctgctgaccagcatgtatgtgaaggagttcctgatcagcagcagccaggatggccaccagtggaccctgttcttccagaatggcaaggtgaaggtgttccagggcaaccaggacagcttcacccctgtggtgaacagcctggacccccccctgctgaccagatacctgaggattcacccccagagctgggtgcaccagattgccctgaggatggaggtgctgggctgtgaggcccaggacctgtactga

SEQ ID NO: 118 - DNA, 4676 bp, Artificial Sequence
  Description of Artificial Sequence: Synthetic polynucleotide
atgcagattgagctgagcacctgcttcttcctgtgcctgctgaggttctgcttctctgccaccaggagatactacctgggggctgtggagctgagctgggactacatgcagtctgacctgggggagctgcctgtggatgccaggtaagcactttttgactattggtactctctcttccccatactcaaaaagttcttaccagttattcaaaccaacaaatcctgaagccatgtttaaggttaggtacaggtatggaatcaaatggcaagggtattaacatttggaaactaacatagctgagcatcagagaagcttgtatttttctcactccttgccttgattgaatcatataagctgttttagagttggatttgagcctacctagaatttttcttcccaacctctcatctttttttctcttatacaggttcccccccagagtgcccaagagcttccccttcaacacctctgtggtgtacaagaagaccctgtttgtggagttcactgaccacctgttcaacattgccaagcccaggcccccctggatgggcctgctgggccccaccatccaggctgaggtgtatgacactgtggtgatcaccctgaagaacatggccagccaccctgtgagcctgcatgctgtgggggtgagctactggaaggcctctgagggggctgagtatgatgaccagaccagccagagggagaaggaggatgacaaggtgttccctgggggcagccacacctatgtgtggcaggtgctgaaggagaatggccccatggcctctgaccccctgtgcctgacctacagctacctgagccatgtggacctggtgaaggacctgaactctggcctgattggggccctgctggtgtgcagggagggcagcctggccaaggagaagacccagaccctgcacaagttcatcctgctgtttgctgtgtttgatgagggcaagagctggcactctgaaaccaagaacagcctgatgcaggacagggatgctgcctctgccagggcctggcccaagatgcacactgtgaatggctatgtgaacaggagcctgcctggcctgattggctgccacaggaagtctgtgtactggcatgtgattggcatgggcaccacccctgaggtgcacagcatcttcctggagggccacaccttcctggtcaggaaccacaggcaggccagcctggagatcagccccatcaccttcctgactgcccagaccctgctgatggacctgggccagttcctgctgagctgccacatcagcagccaccagcatgatggcatggaggcctatgtgaaggtggacagctgccctgaggagccccagctgaggatgaagaacaatgaggaggctgaggactatgatgatgacctgactgactctgagatggatgtggtgaggtttgatgatgacaacagccccagcttcatccagatcaggtctgtggccaagaagcaccccaagacctgggtgcactacattgctgctgaggaggaggactgggactatgcccccctggtgctggcccctgatgacaggagctacaagagccagtacctgaacaatggcccccagaggattggcaggaagtacaagaaggtcaggttcatggcctacactgatgaaaccttcaagaccagggaggccatccagcatgagtctggcatcctgggccccctgctgtatggggaggtgggggacaccctgctgatcatcttcaagaaccaggccagcaggccctacaacatctacccccatggcatcactgatgtgaggcccctgtacagcaggaggctgcccaagggggtgaagcacctgaaggacttccccatcctgcctggggagatcttcaagtacaagtggactgtgactgtggaggatggccccaccaagtctgaccccaggtgcctgaccagatactacagcagctttgtgaacatggagagggacctggcctctggcctgattggccccctgctgatctgctacaaggagtctgtggaccagaggggcaaccagatcatgtctgacaagaggaatgtgatcctgttctctgtgtttgatgagaacaggagctggtacctgactgagaacatccagaggttcctgcccaaccctgctggggtgcagctggaggaccctgagttccaggccagcaacatcatgcacagcatcaatggctatgtgtttgacagcctgcagctgtctgtgtgcctgcatgaggtggcctactggtacatcctgagcattggggcccagactgacttcctgtctgtgttcttctctggctacaccttcaagcacaagatggtgtatgaggacaccctgaccctgttccccttctctggggagactgtgttcatgagcatggagaaccctggcctgtggattctgggctgccacaactctgacttcaggaacaggggcatgactgccctgctgaaagtctccagctgtgacaagaacactggggactactatgaggacagctatgaggacatctctgcctacctgctgagcaagaacaatgccattgagcccaggagcttcagccagaatagcaggcaccccagcaccaggcagaagcagttcaatgccaccaccatcccagagaataccaccctgcagtctgaccaggaggagattgactatgatgacaccatctctgtggagatgaagaaggaggactttgacatctacgacgaggacgagaaccagagccccaggagcttccagaagaagaccaggcactacttcattgctgctgtggagaggctgtgggactatggcatgagcagcagcccccatgtgctgaggaacagggcccagtctggctctgtgccccagttcaagaaggtggtgttccaggagttcactgatggcagcttcacccagcccctgtacagaggggagctgaatgagcacctgggcctgctgggcccctacatcagggctgaggtggaggacaacatcatggtgaccttcaggaaccaggccagcaggccctacagcttctacagcagcctgatcagctatgaggaggaccagaggcagggggctgagcccaggaagaactttgtgaagcccaatgaaaccaagacctacttctggaaggtgcagcaccacatggcccccaccaaggatgagtttgactgcaaggcctgggcctacttctctgatgtggacctggagaaggatgtgcactctggcctgattggccccctgctggtgtgccacaccaacaccctgaaccctgcccatggcaggcaggtgactgtgcaggagtttgccctgttcttcaccatctttgatgaaaccaagagctggtacttcactgagaacatggagaggaactgcagggccccctgcaacatccagatggaggaccccaccttcaaggagaactacaggttccatgccatcaatggctacatcatggacaccctgcctggcctggtgatggcccaggaccagaggatcaggtggtacctgctgagcatgggcagcaatgagaacatccacagcatccacttctctggccatgtgttcactgtgaggaagaaggaggagtacaagatggccctgtacaacctgtaccctggggtgtttgagactgtggagatgctgcccagcaaggctggcatctggagggtggagtgcctgattggggagcacctgcatgctggcatgagcaccctgttcctggtgtacagcaacaagtgccagacccccctgggcatggcctctggccacatcagggacttccagatcactgcctctggccagtatggccagtgggcccccaagctggccaggctgcactactctggcagcatcaatgcctggagcaccaaggagcccttcagctggatcaaggtggacctgctggcccccatgatcatccatggcatcaagacccagggggccaggcagaagttcagcagcctgtacatcagccagttcatcatcatgtacagcctggatggcaagaagtggcagacctacaggggcaacagcactggcaccctgatggtgttctttggcaatgtggacagctctggcatcaagcacaacatcttcaacccccccatcattgccagatacatcaggctgcaccccacccactacagcatcaggagcaccctgaggatggagctgatgggctgtgacctgaacagctgcagcatgcccctgggcatggagagcaaggccatctctgatgcccagatcactgccagcagctacttcaccaacatgtttgccacctggagccccagcaaggccaggctgcacctgcagggcaggagcaatgcctggaggccccaggtcaacaaccccaaggagtggctgcaggtggacttccagaagaccatgaaggtgactggggtgaccacccagggggtgaagagcctgctgaccagcatgtatgtgaaggagttcctgatcagcagcagccaggatggccaccagtggaccctgttcttccagaatggcaaggtgaaggtgttccagggcaaccaggacagcttcacccctgtggtgaacagcctggacccccccctgctgaccagatacctgaggattcacccccagagctgggtgcaccagattgccctgaggatggaggtgctgggctgtgaggcccaggacctgtactga

SEQ ID NO: 119 - DNA, 4678 bp, Artificial Sequence
  Description of Artificial Sequence: Synthetic polynucleotide
atgcagattgagctgagcacctgcttcttcctgtgcctgctgaggttctgcttctctgccaccaggagatactacctgggggctgtggagctgagctgggactacatgcagtctgacctgggggagctgcctgtggatgccaggtaagcaggtgtctattgtgctgaccactttttggtttaaaagaaatggtctttgtgtactaagaattttgatatttatcctacgtgcaataagaagctttaaataggagagttgatcattatatttgtgttttagaaatgtcattctggaatctactgaagaggatggattatatttttggaaggtgggaggcaggttggactggcataaaaattgatgagaaatccactctggttcataggtgagagagcttatactcataggattgatgtcttccctccctaggttcccccccagagtgcccaagagcttccccttcaacacctctgtggtgtacaagaagaccctgtttgtggagttcactgaccacctgttcaacattgccaagcccaggcccccctggatgggcctgctgggccccaccatccaggctgaggtgtatgacactgtggtgatcaccctgaagaacatggccagccaccctgtgagcctgcatgctgtgggggtgagctactggaaggcctctgagggggctgagtatgatgaccagaccagccagagggagaaggaggatgacaaggtgttccctgggggcagccacacctatgtgtggcaggtgctgaaggagaatggccccatggcctctgaccccctgtgcctgacctacagctacctgagccatgtggacctggtgaaggacctgaactctggcctgattggggccctgctggtgtgcagggagggcagcctggccaaggagaagacccagaccctgcacaagttcatcctgctgtttgctgtgtttgatgagggcaagagctggcactctgaaaccaagaacagcctgatgcaggacagggatgctgcctctgccagggcctggcccaagatgcacactgtgaatggctatgtgaacaggagcctgcctggcctgattggctgccacaggaagtctgtgtactggcatgtgattggcatgggcaccacccctgaggtgcacagcatcttcctggagggccacaccttcctggtcaggaaccacaggcaggccagcctggagatcagccccatcaccttcctgactgcccagaccctgctgatggacctgggccagttcctgctgagctgccacatcagcagccaccagcatgatggcatggaggcctatgtgaaggtggacagctgccctgaggagccccagctgaggatgaagaacaatgaggaggctgaggactatgatgatgacctgactgactctgagatggatgtggtgaggtttgatgatgacaacagccccagcttcatccagatcaggtctgtggccaagaagcaccccaagacctgggtgcactacattgctgctgaggaggaggactgggactatgcccccctggtgctggcccctgatgacaggagctacaagagccagtacctgaacaatggcccccagaggattggcaggaagtacaagaaggtcaggttcatggcctacactgatgaaaccttcaagaccagggaggccatccagcatgagtctggcatcctgggccccctgctgtatggggaggtgggggacaccctgctgatcatcttcaagaaccaggccagcaggccctacaacatctacccccatggcatcactgatgtgaggcccctgtacagcaggaggctgcccaagggggtgaagcacctgaaggacttccccatcctgcctggggagatcttcaagtacaagtggactgtgactgtggaggatggccccaccaagtctgaccccaggtgcctgaccagatactacagcagctttgtgaacatggagagggacctggcctctggcctgattggccccctgctgatctgctacaaggagtctgtggaccagaggggcaaccagatcatgtctgacaagaggaatgtgatcctgttctctgtgtttgatgagaacaggagctggtacctgactgagaacatccagaggttcctgcccaaccctgctggggtgcagctggaggaccctgagttccaggccagcaacatcatgcacagcatcaatggctatgtgtttgacagcctgcagctgtctgtgtgcctgcatgaggtggcctactggtacatcctgagcattggggcccagactgacttcctgtctgtgttcttctctggctacaccttcaagcacaagatggtgtatgaggacaccctgaccctgttccccttctctggggagactgtgttcatgagcatggagaaccctggcctgtggattctgggctgccacaactctgacttcaggaacaggggcatgactgccctgctgaaagtctccagctgtgacaagaacactggggactactatgaggacagctatgaggacatctctgcctacctgctgagcaagaacaatgccattgagcccaggagcttcagccagaatagcaggcaccccagcaccaggcagaagcagttcaatgccaccaccatcccagagaataccaccctgcagtctgaccaggaggagattgactatgatgacaccatctctgtggagatgaagaaggaggactttgacatctacgacgaggacgagaaccagagccccaggagcttccagaagaagaccaggcactacttcattgctgctgtggagaggctgtgggactatggcatgagcagcagcccccatgtgctgaggaacagggcccagtctggctctgtgccccagttcaagaaggtggtgttccaggagttcactgatggcagcttcacccagcccctgtacagaggggagctgaatgagcacctgggcctgctgggcccctacatcagggctgaggtggaggacaacatcatggtgaccttcaggaaccaggccagcaggccctacagcttctacagcagcctgatcagctatgaggaggaccagaggcagggggctgagcccaggaagaactttgtgaagcccaatgaaaccaagacctacttctggaaggtgcagcaccacatggcccccaccaaggatgagtttgactgcaaggcctgggcctacttctctgatgtggacctggagaaggatgtgcactctggcctgattggccccctgctggtgtgccacaccaacaccctgaaccctgcccatggcaggcaggtgactgtgcaggagtttgccctgttcttcaccatctttgatgaaaccaagagctggtacttcactgagaacatggagaggaactgcagggccccctgcaacatccagatggaggaccccaccttcaaggagaactacaggttccatgccatcaatggctacatcatggacaccctgcctggcctggtgatggcccaggaccagaggatcaggtggtacctgctgagcatgggcagcaatgagaacatccacagcatccacttctctggccatgtgttcactgtgaggaagaaggaggagtacaagatggccctgtacaacctgtaccctggggtgtttgagactgtggagatgctgcccagcaaggctggcatctggagggtggagtgcctgattggggagcacctgcatgctggcatgagcaccctgttcctggtgtacagcaacaagtgccagacccccctgggcatggcctctggccacatcagggacttccagatcactgcctctggccagtatggccagtgggcccccaagctggccaggctgcactactctggcagcatcaatgcctggagcaccaaggagcccttcagctggatcaaggtggacctgctggcccccatgatcatccatggcatcaagacccagggggccaggcagaagttcagcagcctgtacatcagccagttcatcatcatgtacagcctggatggcaagaagtggcagacctacaggggcaacagcactggcaccctgatggtgttctttggcaatgtggacagctctggcatcaagcacaacatcttcaacccccccatcattgccagatacatcaggctgcaccccacccactacagcatcaggagcaccctgaggatggagctgatgggctgtgacctgaacagctgcagcatgcccctgggcatggagagcaaggccatctctgatgcccagatcactgccagcagctacttcaccaacatgtttgccacctggagccccagcaaggccaggctgcacctgcagggcaggagcaatgcctggaggccccaggtcaacaaccccaaggagtggctgcaggtggacttccagaagaccatgaaggtgactggggtgaccacccagggggtgaagagcctgctgaccagcatgtatgtgaaggagttcctgatcagcagcagccaggatggccaccagtggaccctgttcttccagaatggcaaggtgaaggtgttccagggcaaccaggacagcttcacccctgtggtgaacagcctggacccccccctgctgaccagatacctgaggattcacccccagagctgggtgcaccagattgccctgaggatggaggtgctgggctgtgaggcccaggacctgtactga

SEQ ID NO: 120 - DNA, 4474 bp, Artificial Sequence
  Description of Artificial Sequence: Synthetic polynucleotide
atgcagattgagctgagcacctgcttcttcctgtgcctgctgaggttctgcttctctgccaccaggagatactacctgggggctgtggagctgagctgggactacatgcagtctgacctgggggagctgcctgtggatgccaggtaagggtttaagggatggttggttggtggggtattaatgtttaattacctggagcacctgcctgaaatcactttttttcaggttcccccccagagtgcccaagagcttccccttcaacacctctgtggtgtacaagaagaccctgtttgtggagttcactgaccacctgttcaacattgccaagcccaggcccccctggatgggcctgctgggccccaccatccaggctgaggtgtatgacactgtggtgatcaccctgaagaacatggccagccaccctgtgagcctgcatgctgtgggggtgagctactggaaggcctctgagggggctgagtatgatgaccagaccagccagagggagaaggaggatgacaaggtgttccctgggggcagccacacctatgtgtggcaggtgctgaaggagaatggccccatggcctctgaccccctgtgcctgacctacagctacctgagccatgtggacctggtgaaggacctgaactctggcctgattggggccctgctggtgtgcagggagggcagcctggccaaggagaagacccagaccctgcacaagttcatcctgctgtttgctgtgtttgatgagggcaagagctggcactctgaaaccaagaacagcctgatgcaggacagggatgctgcctctgccagggcctggcccaagatgcacactgtgaatggctatgtgaacaggagcctgcctggcctgattggctgccacaggaagtctgtgtactggcatgtgattggcatgggcaccacccctgaggtgcacagcatcttcctggagggccacaccttcctggtcaggaaccacaggcaggccagcctggagatcagccccatcaccttcctgactgcccagaccctgctgatggacctgggccagttcctgctgagctgccacatcagcagccaccagcatgatggcatggaggcctatgtgaaggtggacagctgccctgaggagccccagctgaggatgaagaacaatgaggaggctgaggactatgatgatgacctgactgactctgagatggatgtggtgaggtttgatgatgacaacagccccagcttcatccagatcaggtctgtggccaagaagcaccccaagacctgggtgcactacattgctgctgaggaggaggactgggactatgcccccctggtgctggcccctgatgacaggagctacaagagccagtacctgaacaatggcccccagaggattggcaggaagtacaagaaggtcaggttcatggcctacactgatgaaaccttcaagaccagggaggccatccagcatgagtctggcatcctgggccccctgctgtatggggaggtgggggacaccctgctgatcatcttcaagaaccaggccagcaggccctacaacatctacccccatggcatcactgatgtgaggcccctgtacagcaggaggctgcccaagggggtgaagcacctgaaggacttccccatcctgcctggggagatcttcaagtacaagtggactgtgactgtggaggatggccccaccaagtctgaccccaggtgcctgaccagatactacagcagctttgtgaacatggagagggacctggcctctggcctgattggccccctgctgatctgctacaaggagtctgtggaccagaggggcaaccagatcatgtctgacaagaggaatgtgatcctgttctctgtgtttgatgagaacaggagctggtacctgactgagaacatccagaggttcctgcccaaccctgctggggtgcagctggaggaccctgagttccaggccagcaacatcatgcacagcatcaatggctatgtgtttgacagcctgcagctgtctgtgtgcctgcatgaggtggcctactggtacatcctgagcattggggcccagactgacttcctgtctgtgttcttctctggctacaccttcaagcacaagatggtgtatgaggacaccctgaccctgttccccttctctggggagactgtgttcatgagcatggagaaccctggcctgtggattctgggctgccacaactctgacttcaggaacaggggcatgactgccctgctgaaagtctccagctgtgacaagaacactggggactactatgaggacagctatgaggacatctctgcctacctgctgagcaagaacaatgccattgagcccaggagcttcagccagaatagcaggcaccccagcaccaggcagaagcagttcaatgccaccaccatcccagagaataccaccctgcagtctgaccaggaggagattgactatgatgacaccatctctgtggagatgaagaaggaggactttgacatctacgacgaggacgagaaccagagccccaggagcttccagaagaagaccaggcactacttcattgctgctgtggagaggctgtgggactatggcatgagcagcagcccccatgtgctgaggaacagggcccagtctggctctgtgccccagttcaagaaggtggtgttccaggagttcactgatggcagcttcacccagcccctgtacagaggggagctgaatgagcacctgggcctgctgggcccctacatcagggctgaggtggaggacaacatcatggtgaccttcaggaaccaggccagcaggccctacagcttctacagcagcctgatcagctatgaggaggaccagaggcagggggctgagcccaggaagaactttgtgaagcccaatgaaaccaagacctacttctggaaggtgcagcaccacatggcccccaccaaggatgagtttgactgcaaggcctgggcctacttctctgatgtggacctggagaaggatgtgcactctggcctgattggccccctgctggtgtgccacaccaacaccctgaaccctgcccatggcaggcaggtgactgtgcaggagtttgccctgttcttcaccatctttgatgaaaccaagagctggtacttcactgagaacatggagaggaactgcagggccccctgcaacatccagatggaggaccccaccttcaaggagaactacaggttccatgccatcaatggctacatcatggacaccctgcctggcctggtgatggcccaggaccagaggatcaggtggtacctgctgagcatgggcagcaatgagaacatccacagcatccacttctctggccatgtgttcactgtgaggaagaaggaggagtacaagatggccctgtacaacctgtaccctggggtgtttgagactgtggagatgctgcccagcaaggctggcatctggagggtggagtgcctgattggggagcacctgcatgctggcatgagcaccctgttcctggtgtacagcaacaagtgccagacccccctgggcatggcctctggccacatcagggacttccagatcactgcctctggccagtatggccagtgggcccccaagctggccaggctgcactactctggcagcatcaatgcctggagcaccaaggagcccttcagctggatcaaggtggacctgctggcccccatgatcatccatggcatcaagacccagggggccaggcagaagttcagcagcctgtacatcagccagttcatcatcatgtacagcctggatggcaagaagtggcagacctacaggggcaacagcactggcaccctgatggtgttctttggcaatgtggacagctctggcatcaagcacaacatcttcaacccccccatcattgccagatacatcaggctgcaccccacccactacagcatcaggagcaccctgaggatggagctgatgggctgtgacctgaacagctgcagcatgcccctgggcatggagagcaaggccatctctgatgcccagatcactgccagcagctacttcaccaacatgtttgccacctggagccccagcaaggccaggctgcacctgcagggcaggagcaatgcctggaggccccaggtcaacaaccccaaggagtggctgcaggtggacttccagaagaccatgaaggtgactggggtgaccacccagggggtgaagagcctgctgaccagcatgtatgtgaaggagttcctgatcagcagcagccaggatggccaccagtggaccctgttcttccagaatggcaaggtgaaggtgttccagggcaaccaggacagcttcacccctgtggtgaacagcctggacccccccctgctgaccagatacctgaggattcacccccagagctgggtgcaccagattgccctgaggatggaggtgctgggctgtgaggcccaggacctgtactga

SEQ ID NO: 121 - DNA, 4542 bp, Artificial Sequence
  Description of Artificial Sequence: Synthetic polynucleotide
atgcagattgagctgagcacctgcttcttcctgtgcctgctgaggttctgcttctctgccaccaggagatactacctgggggctgtggagctgagctgggactacatgcaaagtgatctgggtgagctgcctgtggatgcaaggtaaaggcatgtcctgtagggtctgatcggggccaggattgtggggatgtctccttgctaatagtagaaaagagtagtatggaagcattacttccagctgctttttgaagtgtccaccaaaatgaacgactttttcctttcttcacgcagatttcctcctagagtgccaaaatcttttccattcaacacctctgtggtgtacaagaagaccctgtttgtggagttcactgaccacctgttcaacattgccaagcccaggcccccctggatgggcctgctgggccccaccatccaggctgaggtgtatgacactgtggtgatcaccctgaagaacatggccagccaccctgtgagcctgcatgctgtgggggtgagctactggaaggcctctgagggggctgagtatgatgaccagaccagccagagggagaaggaggatgacaaggtgttccctgggggcagccacacctatgtgtggcaggtgctgaaggagaatggccccatggcctctgaccccctgtgcctgacctacagctacctgagccatgtggacctggtgaaggacctgaactctggcctgattggggccctgctggtgtgcagggagggcagcctggccaaggagaagacccagaccctgcacaagttcatcctgctgtttgctgtgtttgatgagggcaagagctggcactctgaaaccaagaacagcctgatgcaggacagggatgctgcctctgccagggcctggcccaagatgcacactgtgaatggctatgtgaacaggagcctgcctggcctgattggctgccacaggaagtctgtgtactggcatgtgattggcatgggcaccacccctgaggtgcacagcatcttcctggagggccacaccttcctggtcaggaaccacaggcaggccagcctggagatcagccccatcaccttcctgactgcccagaccctgctgatggacctgggccagttcctgctgagctgccacatcagcagccaccagcatgatggcatggaggcctatgtgaaggtggacagctgccctgaggagccccagctgaggatgaagaacaatgaggaggctgaggactatgatgatgacctgactgactctgagatggatgtggtgaggtttgatgatgacaacagccccagcttcatccagatcaggtctgtggccaagaagcaccccaagacctgggtgcactacattgctgctgaggaggaggactgggactatgcccccctggtgctggcccctgatgacaggagctacaagagccagtacctgaacaatggcccccagaggattggcaggaagtacaagaaggtcaggttcatggcctacactgatgaaaccttcaagaccagggaggccatccagcatgagtctggcatcctgggccccctgctgtatggggaggtgggggacaccctgctgatcatcttcaagaaccaggccagcaggccctacaacatctacccccatggcatcactgatgtgaggcccctgtacagcaggaggctgcccaagggggtgaagcacctgaaggacttccccatcctgcctggggagatcttcaagtacaagtggactgtgactgtggaggatggccccaccaagtctgaccccaggtgcctgaccagatactacagcagctttgtgaacatggagagggacctggcctctggcctgattggccccctgctgatctgctacaaggagtctgtggaccagaggggcaaccagatcatgtctgacaagaggaatgtgatcctgttctctgtgtttgatgagaacaggagctggtacctgactgagaacatccagaggttcctgcccaaccctgctggggtgcagctggaggaccctgagttccaggccagcaacatcatgcacagcatcaatggctatgtgtttgacagcctgcagctgtctgtgtgcctgcatgaggtggcctactggtacatcctgagcattggggcccagactgacttcctgtctgtgttcttctctggctacaccttcaagcacaagatggtgtatgaggacaccctgaccctgttccccttctctggggagactgtgttcatgagcatggagaaccctggcctgtggattctgggctgccacaactctgacttcaggaacaggggcatgactgccctgctgaaagtctccagctgtgacaagaacactggggactactatgaggacagctatgaggacatctctgcctacctgctgagcaagaacaatgccattgagcccaggagcttcagccagaatagcaggcaccccagcaccaggcagaagcagttcaatgccaccaccatcccagagaataccaccctgcagtctgaccaggaggagattgactatgatgacaccatctctgtggagatgaagaaggaggactttgacatctacgacgaggacgagaaccagagccccaggagcttccagaagaagaccaggcactacttcattgctgctgtggagaggctgtgggactatggcatgagcagcagcccccatgtgctgaggaacagggcccagtctggctctgtgccccagttcaagaaggtggtgttccaggagttcactgatggcagcttcacccagcccctgtacagaggggagctgaatgagcacctgggcctgctgggcccctacatcagggctgaggtggaggacaacatcatggtgaccttcaggaaccaggccagcaggccctacagcttctacagcagcctgatcagctatgaggaggaccagaggcagggggctgagcccaggaagaactttgtgaagcccaatgaaaccaagacctacttctggaaggtgcagcaccacatggcccccaccaaggatgagtttgactgcaaggcctgggcctacttctctgatgtggacctggagaaggatgtgcactctggcctgattggccccctgctggtgtgccacaccaacaccctgaaccctgcccatggcaggcaggtgactgtgcaggagtttgccctgttcttcaccatctttgatgaaaccaagagctggtacttcactgagaacatggagaggaactgcagggccccctgcaacatccagatggaggaccccaccttcaaggagaactacaggttccatgccatcaatggctacatcatggacaccctgcctggcctggtgatggcccaggaccagaggatcaggtggtacctgctgagcatgggcagcaatgagaacatccacagcatccacttctctggccatgtgttcactgtgaggaagaaggaggagtacaagatggccctgtacaacctgtaccctggggtgtttgagactgtggagatgctgcccagcaaggctggcatctggagggtggagtgcctgattggggagcacctgcatgctggcatgagcaccctgttcctggtgtacagcaacaagtgccagacccccctgggcatggcctctggccacatcagggacttccagatcactgcctctggccagtatggccagtgggcccccaagctggccaggctgcactactctggcagcatcaatgcctggagcaccaaggagcccttcagctggatcaaggtggacctgctggcccccatgatcatccatggcatcaagacccagggggccaggcagaagttcagcagcctgtacatcagccagttcatcatcatgtacagcctggatggcaagaagtggcagacctacaggggcaacagcactggcaccctgatggtgttctttggcaatgtggacagctctggcatcaagcacaacatcttcaacccccccatcattgccagatacatcaggctgcaccccacccactacagcatcaggagcaccctgaggatggagctgatgggctgtgacctgaacagctgcagcatgcccctgggcatggagagcaaggccatctctgatgcccagatcactgccagcagctacttcaccaacatgtttgccacctggagccccagcaaggccaggctgcacctgcagggcaggagcaatgcctggaggccccaggtcaacaaccccaaggagtggctgcaggtggacttccagaagaccatgaaggtgactggggtgaccacccagggggtgaagagcctgctgaccagcatgtatgtgaaggagttcctgatcagcagcagccaggatggccaccagtggaccctgttcttccagaatggcaaggtgaaggtgttccagggcaaccaggacagcttcacccctgtggtgaacagcctggacccccccctgctgaccagatacctgaggattcacccccagagctgggtgcaccagattgccctgaggatggaggtgctgggctgtgaggcccaggacctgtactga

SEQ ID NO: 122 - DNA, 4792 bp, Artificial Sequence
  Description of Artificial Sequence: Synthetic polynucleotide
atgcagattgagctgagcacctgcttcttcctgtgcctgctgaggttctgcttctctgccaccaggagatactacctgggggctgtggagctgagctgggactacatgcaaagtgatctgggtgagctgcctgtggatgcaaggtaaaggcatgtcctgtagggtctgatcggggccaggattgtggggatgtaagtctgcttggaggaaggtgcagacatcgggttaggatggttgtgatgctacctgggccccaaagaaacatttctgggtaaggtgtgcacacatctgtgttattagcagaaatgctaactgccaattcttttcataggtctgacctatttatgattcttatcatatggcacctaatgtatcagttgagttgtgaaaacagtgtttcggtttaatggatgttagggatttatatacaacttcaaatttgcctccttgctaatagtagaaaagagtagtatggaagcattacttccagctgctttttgaagtgtccaccaaaatgaacgactttttcctttcttcacgcagatttcctcctagagtgccaaaatcttttccattcaacacctctgtggtgtacaagaagaccctgtttgtggagttcactgaccacctgttcaacattgccaagcccaggcccccctggatgggcctgctgggccccaccatccaggctgaggtgtatgacactgtggtgatcaccctgaagaacatggccagccaccctgtgagcctgcatgctgtgggggtgagctactggaaggcctctgagggggctgagtatgatgaccagaccagccagagggagaaggaggatgacaaggtgttccctgggggcagccacacctatgtgtggcaggtgctgaaggagaatggccccatggcctctgaccccctgtgcctgacctacagctacctgagccatgtggacctggtgaaggacctgaactctggcctgattggggccctgctggtgtgcagggagggcagcctggccaaggagaagacccagaccctgcacaagttcatcctgctgtttgctgtgtttgatgagggcaagagctggcactctgaaaccaagaacagcctgatgcaggacagggatgctgcctctgccagggcctggcccaagatgcacactgtgaatggctatgtgaacaggagcctgcctggcctgattggctgccacaggaagtctgtgtactggcatgtgattggcatgggcaccacccctgaggtgcacagcatcttcctggagggccacaccttcctggtcaggaaccacaggcaggccagcctggagatcagccccatcaccttcctgactgcccagaccctgctgatggacctgggccagttcctgctgagctgccacatcagcagccaccagcatgatggcatggaggcctatgtgaaggtggacagctgccctgaggagccccagctgaggatgaagaacaatgaggaggctgaggactatgatgatgacctgactgactctgagatggatgtggtgaggtttgatgatgacaacagccccagcttcatccagatcaggtctgtggccaagaagcaccccaagacctgggtgcactacattgctgctgaggaggaggactgggactatgcccccctggtgctggcccctgatgacaggagctacaagagccagtacctgaacaatggcccccagaggattggcaggaagtacaagaaggtcaggttcatggcctacactgatgaaaccttcaagaccagggaggccatccagcatgagtctggcatcctgggccccctgctgtatggggaggtgggggacaccctgctgatcatcttcaagaaccaggccagcaggccctacaacatctacccccatggcatcactgatgtgaggcccctgtacagcaggaggctgcccaagggggtgaagcacctgaaggacttccccatcctgcctggggagatcttcaagtacaagtggactgtgactgtggaggatggccccaccaagtctgaccccaggtgcctgaccagatactacagcagctttgtgaacatggagagggacctggcctctggcctgattggccccctgctgatctgctacaaggagtctgtggaccagaggggcaaccagatcatgtctgacaagaggaatgtgatcctgttctctgtgtttgatgagaacaggagctggtacctgactgagaacatccagaggttcctgcccaaccctgctggggtgcagctggaggaccctgagttccaggccagcaacatcatgcacagcatcaatggctatgtgtttgacagcctgcagctgtctgtgtgcctgcatgaggtggcctactggtacatcctgagcattggggcccagactgacttcctgtctgtgttcttctctggctacaccttcaagcacaagatggtgtatgaggacaccctgaccctgttccccttctctggggagactgtgttcatgagcatggagaaccctggcctgtggattctgggctgccacaactctgacttcaggaacaggggcatgactgccctgctgaaagtctccagctgtgacaagaacactggggactactatgaggacagctatgaggacatctctgcctacctgctgagcaagaacaatgccattgagcccaggagcttcagccagaatagcaggcaccccagcaccaggcagaagcagttcaatgccaccaccatcccagagaataccaccctgcagtctgaccaggaggagattgactatgatgacaccatctctgtggagatgaagaaggaggactttgacatctacgacgaggacgagaaccagagccccaggagcttccagaagaagaccaggcactacttcattgctgctgtggagaggctgtgggactatggcatgagcagcagcccccatgtgctgaggaacagggcccagtctggctctgtgccccagttcaagaaggtggtgttccaggagttcactgatggcagcttcacccagcccctgtacagaggggagctgaatgagcacctgggcctgctgggcccctacatcagggctgaggtggaggacaacatcatggtgaccttcaggaaccaggccagcaggccctacagcttctacagcagcctgatcagctatgaggaggaccagaggcagggggctgagcccaggaagaactttgtgaagcccaatgaaaccaagacctacttctggaaggtgcagcaccacatggcccccaccaaggatgagtttgactgcaaggcctgggcctacttctctgatgtggacctggagaaggatgtgcactctggcctgattggccccctgctggtgtgccacaccaacaccctgaaccctgcccatggcaggcaggtgactgtgcaggagtttgccctgttcttcaccatctttgatgaaaccaagagctggtacttcactgagaacatggagaggaactgcagggccccctgcaacatccagatggaggaccccaccttcaaggagaactacaggttccatgccatcaatggctacatcatggacaccctgcctggcctggtgatggcccaggaccagaggatcaggtggtacctgctgagcatgggcagcaatgagaacatccacagcatccacttctctggccatgtgttcactgtgaggaagaaggaggagtacaagatggccctgtacaacctgtaccctggggtgtttgagactgtggagatgctgcccagcaaggctggcatctggagggtggagtgcctgattggggagcacctgcatgctggcatgagcaccctgttcctggtgtacagcaacaagtgccagacccccctgggcatggcctctggccacatcagggacttccagatcactgcctctggccagtatggccagtgggcccccaagctggccaggctgcactactctggcagcatcaatgcctggagcaccaaggagcccttcagctggatcaaggtggacctgctggcccccatgatcatccatggcatcaagacccagggggccaggcagaagttcagcagcctgtacatcagccagttcatcatcatgtacagcctggatggcaagaagtggcagacctacaggggcaacagcactggcaccctgatggtgttctttggcaatgtggacagctctggcatcaagcacaacatcttcaacccccccatcattgccagatacatcaggctgcaccccacccactacagcatcaggagcaccctgaggatggagctgatgggctgtgacctgaacagctgcagcatgcccctgggcatggagagcaaggccatctctgatgcccagatcactgccagcagctacttcaccaacatgtttgccacctggagccccagcaaggccaggctgcacctgcagggcaggagcaatgcctggaggccccaggtcaacaaccccaaggagtggctgcaggtggacttccagaagaccatgaaggtgactggggtgaccacccagggggtgaagagcctgctgaccagcatgtatgtgaaggagttcctgatcagcagcagccaggatggccaccagtggaccctgttcttccagaatggcaaggtgaaggtgttccagggcaaccaggacagcttcacccctgtggtgaacagcctggacccccccctgctgaccagatacctgaggattcacccccagagctgggtgcaccagattgccctgaggatggaggtgctgggctgtgaggcccaggacctgtactga

SEQ ID NO: 123 - DNA, 4522 bp, Artificial Sequence
  Description of Artificial Sequence: Synthetic polynucleotide
atgcagattgagctgagcacctgcttcttcctgtgcctgctgaggttctgcttctctgccaccaggagatactacctgggggctgtggagctgagctgggactacatgcaaagtgatctgggtgagctgcctgtggatgcaaggttggtatcaaggttacaagacaggtttaaggagaccaatagaaactgggcatgtggagacagagaagactcttgggtttctgataggcactgactctctctgcctattggtctattttcccacccttagatttcctcctagagtgccaaaatcttttccattcaacacctctgtggtgtacaagaagaccctgtttgtggagttcactgaccacctgttcaacattgccaagcccaggcccccctggatgggcctgctgggccccaccatccaggctgaggtgtatgacactgtggtgatcaccctgaagaacatggccagccaccctgtgagcctgcatgctgtgggggtgagctactggaaggcctctgagggggctgagtatgatgaccagaccagccagagggagaaggaggatgacaaggtgttccctgggggcagccacacctatgtgtggcaggtgctgaaggagaatggccccatggcctctgaccccctgtgcctgacctacagctacctgagccatgtggacctggtgaaggacctgaactctggcctgattggggccctgctggtgtgcagggagggcagcctggccaaggagaagacccagaccctgcacaagttcatcctgctgtttgctgtgtttgatgagggcaagagctggcactctgaaaccaagaacagcctgatgcaggacagggatgctgcctctgccagggcctggcccaagatgcacactgtgaatggctatgtgaacaggagcctgcctggcctgattggctgccacaggaagtctgtgtactggcatgtgattggcatgggcaccacccctgaggtgcacagcatcttcctggagggccacaccttcctggtcaggaaccacaggcaggccagcctggagatcagccccatcaccttcctgactgcccagaccctgctgatggacctgggccagttcctgctgagctgccacatcagcagccaccagcatgatggcatggaggcctatgtgaaggtggacagctgccctgaggagccccagctgaggatgaagaacaatgaggaggctgaggactatgatgatgacctgactgactctgagatggatgtggtgaggtttgatgatgacaacagccccagcttcatccagatcaggtctgtggccaagaagcaccccaagacctgggtgcactacattgctgctgaggaggaggactgggactatgcccccctggtgctggcccctgatgacaggagctacaagagccagtacctgaacaatggcccccagaggattggcaggaagtacaagaaggtcaggttcatggcctacactgatgaaaccttcaagaccagggaggccatccagcatgagtctggcatcctgggccccctgctgtatggggaggtgggggacaccctgctgatcatcttcaagaaccaggccagcaggccctacaacatctacccccatggcatcactgatgtgaggcccctgtacagcaggaggctgcccaagggggtgaagcacctgaaggacttccccatcctgcctggggagatcttcaagtacaagtggactgtgactgtggaggatggccccaccaagtctgaccccaggtgcctgaccagatactacagcagctttgtgaacatggagagggacctggcctctggcctgattggccccctgctgatctgctacaaggagtctgtggaccagaggggcaaccagatcatgtctgacaagaggaatgtgatcctgttctctgtgtttgatgagaacaggagctggtacctgactgagaacatccagaggttcctgcccaaccctgctggggtgcagctggaggaccctgagttccaggccagcaacatcatgcacagcatcaatggctatgtgtttgacagcctgcagctgtctgtgtgcctgcatgaggtggcctactggtacatcctgagcattggggcccagactgacttcctgtctgtgttcttctctggctacaccttcaagcacaagatggtgtatgaggacaccctgaccctgttccccttctctggggagactgtgttcatgagcatggagaaccctggcctgtggattctgggctgccacaactctgacttcaggaacaggggcatgactgccctgctgaaagtctccagctgtgacaagaacactggggactactatgaggacagctatgaggacatctctgcctacctgctgagcaagaacaatgccattgagcccaggagcttcagccagaatagcaggcaccccagcaccaggcagaagcagttcaatgccaccaccatcccagagaataccaccctgcagtctgaccaggaggagattgactatgatgacaccatctctgtggagatgaagaaggaggactttgacatctacgacgaggacgagaaccagagccccaggagcttccagaagaagaccaggcactacttcattgctgctgtggagaggctgtgggactatggcatgagcagcagcccccatgtgctgaggaacagggcccagtctggctctgtgccccagttcaagaaggtggtgttccaggagttcactgatggcagcttcacccagcccctgtacagaggggagctgaatgagcacctgggcctgctgggcccctacatcagggctgaggtggaggacaacatcatggtgaccttcaggaaccaggccagcaggccctacagcttctacagcagcctgatcagctatgaggaggaccagaggcagggggctgagcccaggaagaactttgtgaagcccaatgaaaccaagacctacttctggaaggtgcagcaccacatggcccccaccaaggatgagtttgactgcaaggcctgggcctacttctctgatgtggacctggagaaggatgtgcactctggcctgattggccccctgctggtgtgccacaccaacaccctgaaccctgcccatggcaggcaggtgactgtgcaggagtttgccctgttcttcaccatctttgatgaaaccaagagctggtacttcactgagaacatggagaggaactgcagggccccctgcaacatccagatggaggaccccaccttcaaggagaactacaggttccatgccatcaatggctacatcatggacaccctgcctggcctggtgatggcccaggaccagaggatcaggtggtacctgctgagcatgggcagcaatgagaacatccacagcatccacttctctggccatgtgttcactgtgaggaagaaggaggagtacaagatggccctgtacaacctgtaccctggggtgtttgagactgtggagatgctgcccagcaaggctggcatctggagggtggagtgcctgattggggagcacctgcatgctggcatgagcaccctgttcctggtgtacagcaacaagtgccagacccccctgggcatggcctctggccacatcagggacttccagatcactgcctctggccagtatggccagtgggcccccaagctggccaggctgcactactctggcagcatcaatgcctggagcaccaaggagcccttcagctggatcaaggtggacctgctggcccccatgatcatccatggcatcaagacccagggggccaggcagaagttcagcagcctgtacatcagccagttcatcatcatgtacagcctggatggcaagaagtggcagacctacaggggcaacagcactggcaccctgatggtgttctttggcaatgtggacagctctggcatcaagcacaacatcttcaacccccccatcattgccagatacatcaggctgcaccccacccactacagcatcaggagcaccctgaggatggagctgatgggctgtgacctgaacagctgcagcatgcccctgggcatggagagcaaggccatctctgatgcccagatcactgccagcagctacttcaccaacatgtttgccacctggagccccagcaaggccaggctgcacctgcagggcaggagcaatgcctggaggccccaggtcaacaaccccaaggagtggctgcaggtggacttccagaagaccatgaaggtgactggggtgaccacccagggggtgaagagcctgctgaccagcatgtatgtgaaggagttcctgatcagcagcagccaggatggccaccagtggaccctgttcttccagaatggcaaggtgaaggtgttccagggcaaccaggacagcttcacccctgtggtgaacagcctggacccccccctgctgaccagatacctgaggattcacccccagagctgggtgcaccagattgccctgaggatggaggtgctgggctgtgaggcccaggacctgtactga

SEQ ID NO: 124 - DNA, 4676 bp, Artificial Sequence
  Description of Artificial Sequence: Synthetic polynucleotide
atgcagattgagctgagcacctgcttcttcctgtgcctgctgaggttctgcttctctgccaccaggagatactacctgggggctgtggagctgagctgggactacatgcaaagtgatctgggtgagctgcctgtggatgcaaggtaagcactttttgactattggtactctctcttccccatactcaaaaagttcttaccagttattcaaaccaacaaatcctgaagccatgtttaaggttaggtacaggtatggaatcaaatggcaagggtattaacatttggaaactaacatagctgagcatcagagaagcttgtatttttctcactccttgccttgattgaatcatataagctgttttagagttggatttgagcctacctagaatttttcttcccaacctctcatctttttttctcttatacagatttcctcctagagtgccaaaatcttttccattcaacacctctgtggtgtacaagaagaccctgtttgtggagttcactgaccacctgttcaacattgccaagcccaggcccccctggatgggcctgctgggccccaccatccaggctgaggtgtatgacactgtggtgatcaccctgaagaacatggccagccaccctgtgagcctgcatgctgtgggggtgagctactggaaggcctctgagggggctgagtatgatgaccagaccagccagagggagaaggaggatgacaaggtgttccctgggggcagccacacctatgtgtggcaggtgctgaaggagaatggccccatggcctctgaccccctgtgcctgacctacagctacctgagccatgtggacctggtgaaggacctgaactctggcctgattggggccctgctggtgtgcagggagggcagcctggccaaggagaagacccagaccctgcacaagttcatcctgctgtttgctgtgtttgatgagggcaagagctggcactctgaaaccaagaacagcctgatgcaggacagggatgctgcctctgccagggcctggcccaagatgcacactgtgaatggctatgtgaacaggagcctgcctggcctgattggctgccacaggaagtctgtgtactggcatgtgattggcatgggcaccacccctgaggtgcacagcatcttcctggagggccacaccttcctggtcaggaaccacaggcaggccagcctggagatcagccccatcaccttcctgactgcccagaccctgctgatggacctgggccagttcctgctgagctgccacatcagcagccaccagcatgatggcatggaggcctatgtgaaggtggacagctgccctgaggagccccagctgaggatgaagaacaatgaggaggctgaggactatgatgatgacctgactgactctgagatggatgtggtgaggtttgatgatgacaacagccccagcttcatccagatcaggtctgtggccaagaagcaccccaagacctgggtgcactacattgctgctgaggaggaggactgggactatgcccccctggtgctggcccctgatgacaggagctacaagagccagtacctgaacaatggcccccagaggattggcaggaagtacaagaaggtcaggttcatggcctacactgatgaaaccttcaagaccagggaggccatccagcatgagtctggcatcctgggccccctgctgtatggggaggtgggggacaccctgctgatcatcttcaagaaccaggccagcaggccctacaacatctacccccatggcatcactgatgtgaggcccctgtacagcaggaggctgcccaagggggtgaagcacctgaaggacttccccatcctgcctggggagatcttcaagtacaagtggactgtgactgtggaggatggccccaccaagtctgaccccaggtgcctgaccagatactacagcagctttgtgaacatggagagggacctggcctctggcctgattggccccctgctgatctgctacaaggagtctgtggaccagaggggcaaccagatcatgtctgacaagaggaatgtgatcctgttctctgtgtttgatgagaacaggagctggtacctgactgagaacatccagaggttcctgcccaaccctgctggggtgcagctggaggaccctgagttccaggccagcaacatcatgcacagcatcaatggctatgtgtttgacagcctgcagctgtctgtgtgcctgcatgaggtggcctactggtacatcctgagcattggggcccagactgacttcctgtctgtgttcttctctggctacaccttcaagcacaagatggtgtatgaggacaccctgaccctgttccccttctctggggagactgtgttcatgagcatggagaaccctggcctgtggattctgggctgccacaactctgacttcaggaacaggggcatgactgccctgctgaaagtctccagctgtgacaagaacactggggactactatgaggacagctatgaggacatctctgcctacctgctgagcaagaacaatgccattgagcccaggagcttcagccagaatagcaggcaccccagcaccaggcagaagcagttcaatgccaccaccatcccagagaataccaccctgcagtctgaccaggaggagattgactatgatgacaccatctctgtggagatgaagaaggaggactttgacatctacgacgaggacgagaaccagagccccaggagcttccagaagaagaccaggcactacttcattgctgctgtggagaggctgtgggactatggcatgagcagcagcccccatgtgctgaggaacagggcccagtctggctctgtgccccagttcaagaaggtggtgttccaggagttcactgatggcagcttcacccagcccctgtacagaggggagctgaatgagcacctgggcctgctgggcccctacatcagggctgaggtggaggacaacatcatggtgaccttcaggaaccaggccagcaggccctacagcttctacagcagcctgatcagctatgaggaggaccagaggcagggggctgagcccaggaagaactttgtgaagcccaatgaaaccaagacctacttctggaaggtgcagcaccacatggcccccaccaaggatgagtttgactgcaaggcctgggcctacttctctgatgtggacctggagaaggatgtgcactctggcctgattggccccctgctggtgtgccacaccaacaccctgaaccctgcccatggcaggcaggtgactgtgcaggagtttgccctgttcttcaccatctttgatgaaaccaagagctggtacttcactgagaacatggagaggaactgcagggccccctgcaacatccagatggaggaccccaccttcaaggagaactacaggttccatgccatcaatggctacatcatggacaccctgcctggcctggtgatggcccaggaccagaggatcaggtggtacctgctgagcatgggcagcaatgagaacatccacagcatccacttctctggccatgtgttcactgtgaggaagaaggaggagtacaagatggccctgtacaacctgtaccctggggtgtttgagactgtggagatgctgcccagcaaggctggcatctggagggtggagtgcctgattggggagcacctgcatgctggcatgagcaccctgttcctggtgtacagcaacaagtgccagacccccctgggcatggcctctggccacatcagggacttccagatcactgcctctggccagtatggccagtgggcccccaagctggccaggctgcactactctggcagcatcaatgcctggagcaccaaggagcccttcagctggatcaaggtggacctgctggcccccatgatcatccatggcatcaagacccagggggccaggcagaagttcagcagcctgtacatcagccagttcatcatcatgtacagcctggatggcaagaagtggcagacctacaggggcaacagcactggcaccctgatggtgttctttggcaatgtggacagctctggcatcaagcacaacatcttcaacccccccatcattgccagatacatcaggctgcaccccacccactacagcatcaggagcaccctgaggatggagctgatgggctgtgacctgaacagctgcagcatgcccctgggcatggagagcaaggccatctctgatgcccagatcactgccagcagctacttcaccaacatgtttgccacctggagccccagcaaggccaggctgcacctgcagggcaggagcaatgcctggaggccccaggtcaacaaccccaaggagtggctgcaggtggacttccagaagaccatgaaggtgactggggtgaccacccagggggtgaagagcctgctgaccagcatgtatgtgaaggagttcctgatcagcagcagccaggatggccaccagtggaccctgttcttccagaatggcaaggtgaaggtgttccagggcaaccaggacagcttcacccctgtggtgaacagcctggacccccccctgctgaccagatacctgaggattcacccccagagctgggtgcaccagattgccctgaggatggaggtgctgggctgtgaggcccaggacctgtactga

SEQ ID NO: 125 - DNA, 4392 bp, Artificial Sequence
  Description of Artificial Sequence: Synthetic polynucleotide
atgcagattgagctgagcacctgcttcttcctgtgcctgctgaggttctgcttctctgccaccaggagatactacctgggggctgtggagctgagctgggactacatgcaaagtgatctgggtgagctgcctgtggatgcaagatttcctcctagagtgccaaaatcttttccattcaacacctctgtggtgtacaagaagaccctgtttgtggagttcactgaccacctgttcaacattgccaagcccaggcccccctggatgggcctgctgggccccaccatccaggctgaggtgtatgacactgtggtgatcaccctgaagaacatggccagccaccctgtgagcctgcatgctgtgggggtgagctactggaaggcctctgagggggctgagtatgatgaccagaccagccagagggagaaggaggatgacaaggtgttccctgggggcagccacacctatgtgtggcaggtgctgaaggagaatggccccatggcctctgaccccctgtgcctgacctacagctacctgagccatgtggacctggtgaaggacctgaactctggcctgattggggccctgctggtgtgcagggagggcagcctggccaaggagaagacccagaccctgcacaagttcatcctgctgtttgctgtgtttgatgagggcaagagctggcactctgaaaccaagaacagcctgatgcaggacagggatgctgcctctgccagggcctggcccaagatgcacactgtgaatggctatgtgaacaggagcctgcctggcctgattggctgccacaggaagtctgtgtactggcatgtgattggcatgggcaccacccctgaggtgcacagcatcttcctggagggccacaccttcctggtcaggaaccacaggcaggccagcctggagatcagccccatcaccttcctgactgcccagaccctgctgatggacctgggccagttcctgctgagctgccacatcagcagccaccagcatgatggcatggaggcctatgtgaaggtggacagctgccctgaggagccccagctgaggatgaagaacaatgaggaggctgaggactatgatgatgacctgactgactctgagatggatgtggtgaggtttgatgatgacaacagccccagcttcatccagatcaggtctgtggccaagaagcaccccaagacctgggtgcactacattgctgctgaggaggaggactgggactatgcccccctggtgctggcccctgatgacaggagctacaagagccagtacctgaacaatggcccccagaggattggcaggaagtacaagaaggtcaggttcatggcctacactgatgaaaccttcaagaccagggaggccatccagcatgagtctggcatcctgggccccctgctgtatggggaggtgggggacaccctgctgatcatcttcaagaaccaggccagcaggccctacaacatctacccccatggcatcactgatgtgaggcccctgtacagcaggaggctgcccaagggggtgaagcacctgaaggacttccccatcctgcctggggagatcttcaagtacaagtggactgtgactgtggaggatggccccaccaagtctgaccccaggtgcctgaccagatactacagcagctttgtgaacatggagagggacctggcctctggcctgattggccccctgctgatctgctacaaggagtctgtggaccagaggggcaaccagatcatgtctgacaagaggaatgtgatcctgttctctgtgtttgatgagaacaggagctggtacctgactgagaacatccagaggttcctgcccaaccctgctggggtgcagctggaggaccctgagttccaggccagcaacatcatgcacagcatcaatggctatgtgtttgacagcctgcagctgtctgtgtgcctgcatgaggtggcctactggtacatcctgagcattggggcccagactgacttcctgtctgtgttcttctctggctacaccttcaagcacaagatggtgtatgaggacaccctgaccctgttccccttctctggggagactgtgttcatgagcatggagaaccctggcctgtggattctgggctgccacaactctgacttcaggaacaggggcatgactgccctgctgaaagtctccagctgtgacaagaacactggggactactatgaggacagctatgaggacatctctgcctacctgctgagcaagaacaatgccattgagcccaggagcttcagccagaatagcaggcaccccagcaccaggcagaagcagttcaatgccaccaccatcccagagaataccaccctgcagtctgaccaggaggagattgactatgatgacaccatctctgtggagatgaagaaggaggactttgacatctacgacgaggacgagaaccagagccccaggagcttccagaagaagaccaggcactacttcattgctgctgtggagaggctgtgggactatggcatgagcagcagcccccatgtgctgaggaacagggcccagtctggctctgtgccccagttcaagaaggtggtgttccaggagttcactgatggcagcttcacccagcccctgtacagaggggagctgaatgagcacctgggcctgctgggcccctacatcagggctgaggtggaggacaacatcatggtgaccttcaggaaccaggccagcaggccctacagcttctacagcagcctgatcagctatgaggaggaccagaggcagggggctgagcccaggaagaactttgtgaagcccaatgaaaccaagacctacttctggaaggtgcagcaccacatggcccccaccaaggatgagtttgactgcaaggcctgggcctacttctctgatgtggacctggagaaggatgtgcactctggcctgattggccccctgctggtgtgccacaccaacaccctgaaccctgcccatggcaggcaggtgactgtgcaggagtttgccctgttcttcaccatctttgatgaaaccaagagctggtacttcactgagaacatggagaggaactgcagggccccctgcaacatccagatggaggaccccaccttcaaggagaactacaggttccatgccatcaatggctacatcatggacaccctgcctggcctggtgatggcccaggaccagaggatcaggtggtacctgctgagcatgggcagcaatgagaacatccacagcatccacttctctggccatgtgttcactgtgaggaagaaggaggagtacaagatggccctgtacaacctgtaccctggggtgtttgagactgtggagatgctgcccagcaaggctggcatctggagggtggagtgcctgattggggagcacctgcatgctggcatgagcaccctgttcctggtgtacagcaacaagtgccagacccccctgggcatggcctctggccacatcagggacttccagatcactgcctctggccagtatggccagtgggcccccaagctggccaggctgcactactctggcagcatcaatgcctggagcaccaaggagcccttcagctggatcaaggtggacctgctggcccccatgatcatccatggcatcaagacccagggggccaggcagaagttcagcagcctgtacatcagccagttcatcatcatgtacagcctggatggcaagaagtggcagacctacaggggcaacagcactggcaccctgatggtgttctttggcaatgtggacagctctggcatcaagcacaacatcttcaacccccccatcattgccagatacatcaggctgcaccccacccactacagcatcaggagcaccctgaggatggagctgatgggctgtgacctgaacagctgcagcatgcccctgggcatggagagcaaggccatctctgatgcccagatcactgccagcagctacttcaccaacatgtttgccacctggagccccagcaaggccaggctgcacctgcagggcaggagcaatgcctggaggccccaggtcaacaaccccaaggagtggctgcaggtggacttccagaagaccatgaaggtgactggggtgaccacccagggggtgaagagcctgctgaccagcatgtatgtgaaggagttcctgatcagcagcagccaggatggccaccagtggaccctgttcttccagaatggcaaggtgaaggtgttccagggcaaccaggacagcttcacccctgtggtgaacagcctggacccccccctgctgaccagatacctgaggattcacccccagagctgggtgcaccagattgccctgaggatggaggtgctgggctgtgaggcccaggacctgtactga

SEQ ID NO: 126 - DNA, 4392 bp, Artificial Sequence
  Description of Artificial Sequence: Synthetic polynucleotide
atgcagattgagctcagtacctgtttctttctgtgtctgctgagattctgtttcagtgccaccagaaggtattacctaggagcagtagagctctcttgggactatatgcagagtgatctgggggaattgcctgttgatgccaggttccctcctagagtgccaaagtcatttcccttcaatacatcagtggtgtacaagaaaacactctttgtggagtttacagaccacctattcaacattgccaagcccaggcccccttggatggggctccttggccccacaatccaagcagaagtgtatgacacagttgtcattacccttaagaacatggcctcacacccagtttccctgcatgctgtgggtgtgagttactggaaggcctcagagggagcagaatatgatgatcagacaagccaaagagagaaggaggatgataaggtctttccaggaggaagtcacacttatgtctggcaagtgctcaaggagaatggtccaatggctagtgaccccttgtgtctgacatactcctacctgtctcatgtagacctggtgaaggacctcaacagtggattgataggagccctcctggtgtgtagggaaggctctctggctaaggagaaaacccagaccctgcataaatttatactcctctttgctgtgtttgatgagggtaaaagctggcactcagagaccaagaactctctgatgcaggatagagatgctgctagtgccagagcttggcccaaaatgcacactgttaatggatatgttaacaggagcctgccaggcctcattgggtgtcataggaaatcagtttattggcatgtgattggaatgggcaccacacctgaggtgcattccatcttcttggagggccacaccttcctggtgagaaatcataggcaagctagtctggaaatttctcctattaccttcctgacagcccagacactgctgatggaccttggacagtttctgttgtcctgccacatatcaagccatcaacatgatggtatggaagcctatgtgaaggttgactcatgccctgaagaaccacagctgaggatgaagaataatgaagaagctgaggactatgatgatgacctgactgattctgagatggatgttgtaaggtttgatgatgataactctccctcttttattcaaattagaagtgtggcaaagaaacatccaaagacttgggtgcactacattgcagcagaagaagaggactgggactatgcccctcttgtactggctccagatgacaggtcctacaagtctcagtatctgaataatggaccacagagaattggcaggaaatacaagaaggtgagatttatggcatatactgatgagacctttaagactagggaggccatccagcatgaatcaggaatacttggaccactcctctatggagaggtgggagacacactgctcattatttttaagaaccaggctagcaggccatacaacatctacccccatggcatcacagatgtgaggccactttactccaggagacttccaaaaggtgtgaagcacttgaaggactttcctattttgcctggagagatctttaagtataaatggactgtgactgtggaggatggcccaactaagagtgaccccaggtgtttgaccaggtattatagctcttttgtcaatatggaaagggatctggcatctggcctaataggccccttgttaatatgttacaaagaatctgttgaccaaagaggcaatcagataatgtcagataaaagaaatgtcatcctgttttcagtgtttgatgaaaacagatcttggtatcttactgaaaacatacagagatttctgccaaaccctgcaggggtccagttggaagatcctgaatttcaggcatctaacattatgcacagcattaatggctatgtgtttgacagtctccagctttctgtatgcctccatgaagtggcctactggtatatcctctccattggggcacagactgacttcctgtctgttttcttttctgggtacacatttaagcacaagatggtctatgaggacactcttactctattcccattttctggagaaactgtgttcatgtcaatggagaacccagggctctggatcctggggtgtcataactcagactttaggaatagaggcatgacagccttgctcaaggtgtcctcatgtgacaaaaatactggtgactactatgaggacagttatgaggatatttctgcttatctcctatccaagaataatgccattgaaccaagatccttcagtcagaattcaaggcatcccagcaccagacagaaacagttcaatgcaacaaccattcctgagaatactaccttgcaatcagaccaggaggagatagactatgatgacacaatttctgtggaaatgaagaaagaggactttgatatttatgatgaggatgagaatcagagccctaggtccttccagaagaaaacaaggcattacttcatagctgctgtggaaaggctctgggactatggcatgtccagttctcctcatgtactgaggaacagagctcagagtggctcagtaccacaattcaagaaggttgtgttccaggaatttacagatggcagttttacccagcctttatataggggagaattgaatgaacatctgggccttctggggccatatattagggctgaggtggaagataatattatggtgacctttaggaaccaggcctccagaccttactcattctactctagtttaatctcttatgaagaggaccaaaggcagggagctgaacctagaaagaactttgtcaagcctaatgaaacaaaaacttatttttggaaggtccagcaccacatggcaccaaccaaagatgaatttgattgtaaggcatgggcctacttctctgatgttgatcttgagaaagatgtgcactctggactcattggtcccctgctggtgtgccacacaaacactcttaacccagcccatggaagacaggttacagtccaggaatttgccctctttttcaccatatttgatgagaccaaaagctggtacttcacagagaacatggaaaggaactgtagagctccttgcaacatccaaatggaagatcccacttttaaggagaactacaggttccatgcaatcaatggctacatcatggatactctgccagggctggtgatggcacaggaccaaaggatcaggtggtaccttctgtctatgggtagcaatgaaaacattcattcaatacatttttcaggacatgtgtttacagtgaggaaaaaggaggaatataaaatggccctgtacaacctgtacccaggtgtgtttgaaacagtggagatgttacccagtaaagcaggcatctggagggtggagtgccttattggggaacatctgcatgctggcatgtctactctcttcctggtgtatagcaacaaatgccagaccccactgggaatggcatctgggcacattagagattttcagatcacagcatcagggcagtatggccagtgggccccaaagctggctagattgcattattcagggtcaatcaatgcctggagcacaaaagaacccttttcatggatcaaggtggatctcctggcccccatgataattcatggcatcaagacccagggggctagacagaagttctcttccctgtacatcagccaatttatcattatgtacagcttagatggcaagaagtggcaaacatatagaggaaatagcacaggcactttaatggttttctttggcaatgtggactcctctggcataaagcacaatatttttaaccccccaatcatagccaggtacatcaggctgcatcccacacattacagcattaggagcacactcaggatggaacttatgggttgtgacttgaatagttgctctatgcccctaggcatggagagcaaggccatcagtgatgcacagattacagcatccagttactttacaaatatgtttgctacctggtccccttctaaggccaggctccatctgcagggaaggtctaatgcctggaggcctcaggtgaacaaccccaaagaatggctgcaagtggacttccagaagaccatgaaggtgactggggtgaccacacagggggtgaagtcactgcttactagcatgtatgtaaaagagtttctgattagttcttcacaggatggtcatcaatggacattgttcttccagaatgggaaggtcaaagtttttcagggaaaccaggattcttttaccccagtagtgaactcattagacccccctcttctgaccaggtatcttagaattcacccccagtcctgggtgcaccaaatagctctgagaatggaggttctgggttgtgaggctcaagacctatattaa

SEQ ID NO: 127 - DNA, 4392 bp, Artificial Sequence
  Description of Artificial Sequence: Synthetic polynucleotide
atgcagattgagctcagtacctgtttctttctgtgtctgctgagattctgtttcagtgccaccagaaggtattacctaggagcagtagagctctcttgggactatatgcagagtgatctgggggaattgcctgttgatgccaggttccctcctagagtgccaaagtcatttcccttcaatacatcagtggtgtacaagaaaacactctttgtggagtttacagaccacctattcaacattgccaagcccaggcccccttggatggggctccttggccccacaatccaagcagaagtgtatgacacagttgtcattacccttaagaacatggcctcacacccagtttccctgcatgctgtgggtgtgagttactggaaggcctcagagggagcagaatatgatgatcagacaagccaaagagagaaggaggatgataaggtctttccaggaggaagtcacacttatgtctggcaagtgctcaaggagaatggtccaatggctagtgaccccttgtgtctgacatactcctacctgtctcatgtagacctggtgaaggacctcaacagtggattgataggagccctcctggtgtgtagggaaggctctctggctaaggagaaaacccagaccctgcataaatttatactcctctttgctgtgtttgatgagggtaaaagctggcactcagagaccaagaactctctgatgcaggatagagatgctgctagtgccagagcttggcccaaaatgcacactgttaatggatatgttaacaggagcctgccaggcctcattgggtgtcataggaaatcagtttattggcatgtgattggaatgggcaccacacctgaggtgcattccatcttcttggagggccacaccttcctggtgagaaatcataggcaagctagtctggaaatttctcctattaccttcctgacagcccagacactgctgatggaccttggacagtttctgttgttctgccacatatcaagccatcaacatgatggtatggaagcctatgtgaaggttgactcatgccctgaagaaccacagctgaggatgaagaataatgaagaagctgaggactatgatgatgacctgactgattctgagatggatgttgtaaggtttgatgatgataactctccctcttttattcaaattagaagtgtggcaaagaaacatccaaagacttgggtgcactacattgcagcagaagaagaggactgggactatgcccctcttgtactggctccagatgacaggtcctacaagtctcagtatctgaataatggaccacagagaattggcaggaaatacaagaaggtgagatttatggcatatactgatgagacctttaagactagggaggccatccagcatgaatcaggaatacttggaccactcctctatggagaggtgggagacacactgctcattatttttaagaaccaggctagcaggccatacaacatctacccccatggcatcacagatgtgaggccactttactccaggagacttccaaaaggtgtgaagcacttgaaggactttcctattttgcctggagagatctttaagtataaatggactgtgactgtggaggatggcccaactaagagtgaccccaggtgtttgaccaggtattatagctcttttgtcaatatggaaagggatctggcatctggcctaataggccccttgttaatatgttacaaagaatctgttgaccaaagaggcaatcagataatgtcagataaaagaaatgtcatcctgttttcagtgtttgatgaaaacagatcttggtatcttactgaaaacatacagagatttctgccaaaccctgcaggggtccagttggaagatcctgaatttcaggcatctaacattatgcacagcattaatggctatgtgtttgacagtctccagctttctgtatgcctccatgaagtggcctactggtatatcctctccattggggcacagactgacttcctgtctgttttcttttctgggtacacatttaagcacaagatggtctatgaggacactcttactctattcccattttctggagaaactgtgttcatgtcaatggagaacccagggctctggatcctggggtgtcataactcagactttaggaatagaggcatgacagccttgctcaaggtgtcctcatgtgacaaaaatactggtgactactatgaggacagttatgaggatatttctgcttatctcctatccaagaataatgccattgaaccaagatccttcagtcagaattcaaggcatcccagcaccagacagaaacagttcaatgcaacaaccattcctgagaatactaccttgcaatcagaccaggaggagatagactatgatgacacaatttctgtggaaatgaagaaagaggactttgatatttatgatgaggatgagaatcagagccctaggtccttccagaagaaaacaaggcattacttcatagctgctgtggaaaggctctgggactatggcatgtccagttctcctcatgtactgaggaacagagctcagagtggctcagtaccacaattcaagaaggttgtgttccaggaatttacagatggcagttttacccagcctttatataggggagaattgaatgaacatctgggccttctggggccatatattagggctgaggtggaagataatattatggtgacctttaggaaccaggcctccagaccttactcattctactctagtttaatctcttatgaagaggaccaaaggcagggagctgaacctagaaagaactttgtcaagcctaatgaaacaaaaacttatttttggaaggtccagcaccacatggcaccaaccaaagatgaatttgattgtaaggcatgggcctacttctctgatgttgatcttgagaaagatgtgcactctggactcattggtcccctgctggtgtgccacacaaacactcttaacccagcccatggaagacaggttacagtccaggaatttgccctctttttcaccatatttgatgagaccaaaagctggtacttcacagagaacatggaaaggaactgtagagctccttgcaacatccaaatggaagatcccacttttaaggagaactacaggttccatgcaatcaatggctacatcatggatactctgccagggctggtgatggcacaggaccaaaggatcaggtggtaccttctgtctatgggtagcaatgaaaacattcattcaatacatttttcaggacatgtgtttacagtgaggaaaaaggaggaatataaaatggccctgtacaacctgtacccaggtgtgtttgaaacagtggagatgttacccagtaaagcaggcatctggagggtggagtgccttattggggaacatctgcatgctggcatgtctactctcttcctggtgtatagcaacaaatgccagaccccactgggaatggcatctgggcacattagagattttcagatcacagcatcagggcagtatggccagtgggccccaaagctggctagattgcattattcagggtcaatcaatgcctggagcacaaaagaacccttttcatggatcaaggtggatctcctggcccccatgataattcatggcatcaagacccagggggctagacagaagttctcttccctgtacatcagccaatttatcattatgtacagcttagatggcaagaagtggcaaacatatagaggaaatagcacaggcactttaatggttttctttggcaatgtggactcctctggcataaagcacaatatttttaaccccccaatcatagccaggtacatcaggctgcatcccacacattacagcattaggagcacactcaggatggaacttatgggttgtgacttgaatagttgctctatgcccctaggcatggagagcaaggccatcagtgatgcacagattacagcatccagttactttacaaatatgtttgctacctggtccccttctaaggccaggctccatctgcagggaaggtctaatgcctggaggcctcaggtgaacaaccccaaagaatggctgcaagtggacttccagaagaccatgaaggtgactggggtgaccacacagggggtgaagtcactgcttactagcatgtatgtaaaagagtttctgattagttcttcacaggatggtcatcaatggacattgttcttccagaatgggaaggtcaaagtttttcagggaaaccaggattcttttaccccagtagtgaactcattagacccccctcttctgaccaggtatcttagaattcacccccagtcctgggtgcaccaaatagctctgagaatggaggttctgggttgtgaggctcaagacctatattaa

SEQ ID NO: 128 - DNA, 4392 bp, Artificial Sequence
  Description of Artificial Sequence: Synthetic polynucleotide
atgcagattgagctgtcaacctgcttcttcctgtgcctgctgaggttctgcttcagtgccaccaggagatactacctgggggctgtggagctgagctgggactacatgcagtctgacttgggggagctgcctgtggatgccaggtttcccccaagagtgcctaagagcttccccttcaacacctctgtggtgtacaagaagaccctgtttgtggagttcacagaccacctcttcaacattgccaagcctaggcccccctggatgggcctgctgggccccaccatccaggctgaggtgtatgatacagtggtcatcacactgaagaacatggccagccaccctgtcagcctgcatgctgtgggggtgtcctactggaaggcctctgagggggctgagtatgatgaccagacctcacagagggagaaggaggatgacaaggtgttccctgggggcagccacacctatgtgtggcaggtgctgaaggaaaatggccccatggcctctgaccccctgtgcctcacctacagctacctgagccatgtggacttggtgaaggacctgaactctggcctcattggggccctgctggtgtgcagggagggctctctggccaaggagaagacccaaaccctgcacaagttcatcctgctgtttgctgtttttgatgagggcaagagctggcactctgagaccaagaacagcctgatgcaggacagggatgctgcatctgccagggcctggccaaagatgcacacagtgaatgggtatgtgaacaggagcctgcctggcctgattggctgccacaggaagtctgtgtactggcatgtgattgggatgggcaccactcctgaggtgcacagcatcttcttggaggggcacaccttcctggtgaggaatcacaggcaggccagcctggagatcagtcccatcacattcctgacagcccagaccctgctgatggatctgggccagttcctgctgagctgccacatctccagccaccagcatgatggcatggaggcttatgtgaaggtggacagctgcccagaggagccccagctgaggatgaagaacaatgaggaggctgaggattatgatgatgacctcacagactctgagatggatgtggtgaggtttgatgatgacaacagccccagcttcatccagatcaggtctgtggccaagaagcaccccaagacctgggtgcactacattgctgctgaggaggaggactgggactatgcacccctggtgctagccccagatgacaggtcctacaagagccagtacctgaacaatggcccccagaggattggcaggaagtataagaaggtgaggttcatggcctacacagatgagaccttcaaaaccagggaggccatacagcatgagtctggcattctgggacccctgctgtatggggaggtgggggacaccctgctgatcatcttcaagaaccaggccagcaggccctacaacatctacccccatggcatcacagatgtgaggcccctgtatagcaggaggctgccaaagggggtgaagcacctcaaggacttccccatcctgcctggtgaaatcttcaagtacaagtggacagtgacagtggaggatgggcccaccaagtcagaccccaggtgcctgaccagatactacagtagctttgtgaacatggagagggacctggcctctggcctgattgggcccctgctgatctgctacaaggagtctgtagaccagaggggcaatcagatcatgtctgacaagaggaatgtcatcctgttctctgtgtttgatgagaacaggagctggtacctgacagagaatatccagagattcctgcccaaccctgctggggtgcagctggaggaccctgagttccaggccagcaacatcatgcacagcatcaatggctatgtgtttgacagtcttcagctgtctgtgtgcctgcatgaggtggcctattggtacatccttagcattggggcccagacagacttcctctctgtgttcttttctggctacaccttcaagcacaagatggtgtatgaggataccctgaccctgttccccttctctggggagacagtgttcatgagcatggagaaccctggcttatggatactgggctgccataactctgacttcaggaacagggggatgacagccctgctgaaggtgtcaagctgtgacaagaacacaggggactactatgaggacagctatgaggacatatcagcctacctgctgagcaagaacaatgccattgagcccaggagcttcagccagaactccaggcaccccagcaccaggcagaagcagttcaatgccaccaccatccctgaaaataccaccctgcagtctgaccaggaggagattgactatgatgataccatctctgtggagatgaagaaggaggattttgacatctatgatgaggatgagaatcagagccctaggagcttccagaagaagaccaggcactacttcattgctgctgtggaaaggctgtgggactatggcatgagcagcagccctcatgtgctgaggaacagggcccagtctgggtctgtgccccagttcaagaaggtggtgttccaggagttcacagatggcagcttcacccagcccctgtacagaggggagctgaatgagcacctgggcctccttgggccctacatcagggctgaggtggaggacaacatcatggtgaccttcaggaaccaggccagcaggccctacagcttctacagcagcctaatcagctatgaggaggaccagaggcagggggctgagccaaggaagaactttgtgaagcccaatgaaaccaagacctacttctggaaggtgcagcatcacatggcccctaccaaggatgagtttgactgcaaggcctgggcctacttctctgatgtggacttggagaaggatgtgcactctggcctgattgggcccctgctggtgtgccacaccaacaccctgaaccctgcccatggcaggcaggtgacagtgcaggagtttgccctgttcttcaccatctttgatgagaccaagagctggtactttacagagaacatggagaggaactgcagggccccctgcaacatccagatggaggaccccaccttcaaagagaattacaggttccatgccatcaatggctacatcatggacactctgcctggcctggtcatggcccaggatcagaggatcaggtggtatctgcttagcatgggcagcaatgagaacatccacagcatccacttctctggccatgtgttcacagtgagaaagaaggaggaatacaagatggccctgtataacctgtaccctggggtgtttgagacagtggagatgctgcccagcaaggctggcatctggagggtggaatgcctgattggggagcacctgcatgcaggcatgtctaccctgttcctggtgtacagcaacaagtgccagacccccctgggcatggcatctgggcacatcagggacttccagattacagcctctgggcagtatggccagtgggcacccaagctggccaggctgcactattctggcagcatcaatgcctggagcaccaaggagcccttcagctggataaaggtggacctgctggcccccatgatcattcatggcatcaagacccagggggccaggcagaagttcagcagcctgtacatcagccagttcatcatcatgtactctctggatggcaagaagtggcagacctacagggggaatagcacagggaccctgatggtgttctttggcaatgtggacagctctggcatcaagcacaatatcttcaacccccccatcatagccagatacatcaggctgcaccctacccattacagcatcaggtccaccctgaggatggagctgatgggctgtgatctgaacagctgctccatgcccctgggcatggagagcaaggccatctctgatgcccagatcacagccagcagctacttcaccaatatgtttgccacctggagccccagcaaggcaaggctgcacttgcagggcaggtccaatgcctggaggccccaggtaaacaaccccaaggagtggctgcaggtggactttcagaagaccatgaaggtgacaggggtgaccacccagggggtgaagagcctgctgaccagcatgtatgtgaaggagttcttgatcagcagcagccaggatggccaccagtggaccctgttcttccagaatgggaaggtgaaggtgttccagggcaaccaggacagcttcacccctgtggtgaacagcctggacccccccctgctgaccagatatctgaggatccatccccagagctgggtgcaccagattgctctgaggatggaggttctgggctgtgaagcccaggacctgtactga

SEQ ID NO: 129 - DNA, 4392 bp, Artificial Sequence
  Description of Artificial Sequence: Synthetic polynucleotide
atgcagattgagctgtcaacctgcttcttcctgtgcctgctgaggttctgcttcagtgccaccaggagatactacctgggggctgtggagctgagctgggactacatgcagtctgacttgggggagctgcctgtggatgccaggtttcccccaagagtgcctaagagcttccccttcaacacctctgtggtgtacaagaagaccctgtttgtggagttcacagaccacctcttcaacattgccaagcctaggcccccctggatgggcctgctgggccccaccatccaggctgaggtgtatgatacagtggtcatcacactgaagaacatggccagccaccctgtcagcctgcatgctgtgggggtgtcctactggaaggcctctgagggggctgagtatgatgaccagacctcacagagggagaaggaggatgacaaggtgttccctgggggcagccacacctatgtgtggcaggtgctgaaggaaaatggccccatggcctctgaccccctgtgcctcacctacagctacctgagccatgtggacttggtgaaggacctgaactctggcctcattggggccctgctggtgtgcagggagggctctctggccaaggagaagacccaaaccctgcacaagttcatcctgctgtttgctgtttttgatgagggcaagagctggcactctgagaccaagaacagcctgatgcaggacagggatgctgcatctgccagggcctggccaaagatgcacacagtgaatgggtatgtgaacaggagcctgcctggcctgattggctgccacaggaagtctgtgtactggcatgtgattgggatgggcaccactcctgaggtgcacagcatcttcttggaggggcacaccttcctggtgaggaatcacaggcaggccagcctggagatcagtcccatcacattcctgacagcccagaccctgctgatggatctgggccagttcctgctgttctgccacatctccagccaccagcatgatggcatggaggcttatgtgaaggtggacagctgcccagaggagccccagctgaggatgaagaacaatgaggaggctgaggattatgatgatgacctcacagactctgagatggatgtggtgaggtttgatgatgacaacagccccagcttcatccagatcaggtctgtggccaagaagcaccccaagacctgggtgcactacattgctgctgaggaggaggactgggactatgcacccctggtgctagccccagatgacaggtcctacaagagccagtacctgaacaatggcccccagaggattggcaggaagtataagaaggtgaggttcatggcctacacagatgagaccttcaaaaccagggaggccatacagcatgagtctggcattctgggacccctgctgtatggggaggtgggggacaccctgctgatcatcttcaagaaccaggccagcaggccctacaacatctacccccatggcatcacagatgtgaggcccctgtatagcaggaggctgccaaagggggtgaagcacctcaaggacttccccatcctgcctggtgaaatcttcaagtacaagtggacagtgacagtggaggatgggcccaccaagtcagaccccaggtgcctgaccagatactacagtagctttgtgaacatggagagggacctggcctctggcctgattgggcccctgctgatctgctacaaggagtctgtagaccagaggggcaatcagatcatgtctgacaagaggaatgtcatcctgttctctgtgtttgatgagaacaggagctggtacctgacagagaatatccagagattcctgcccaaccctgctggggtgcagctggaggaccctgagttccaggccagcaacatcatgcacagcatcaatggctatgtgtttgacagtcttcagctgtctgtgtgcctgcatgaggtggcctattggtacatccttagcattggggcccagacagacttcctctctgtgttcttttctggctacaccttcaagcacaagatggtgtatgaggataccctgaccctgttccccttctctggggagacagtgttcatgagcatggagaaccctggcttatggatactgggctgccataactctgacttcaggaacagggggatgacagccctgctgaaggtgtcaagctgtgacaagaacacaggggactactatgaggacagctatgaggacatatcagcctacctgctgagcaagaacaatgccattgagcccaggagcttcagccagaactccaggcaccccagcaccaggcagaagcagttcaatgccaccaccatccctgaaaataccaccctgcagtctgaccaggaggagattgactatgatgataccatctctgtggagatgaagaaggaggattttgacatctatgatgaggatgagaatcagagccctaggagcttccagaagaagaccaggcactacttcattgctgctgtggaaaggctgtgggactatggcatgagcagcagccctcatgtgctgaggaacagggcccagtctgggtctgtgccccagttcaagaaggtggtgttccaggagttcacagatggcagcttcacccagcccctgtacagaggggagctgaatgagcacctgggcctccttgggccctacatcagggctgaggtggaggacaacatcatggtgaccttcaggaaccaggccagcaggccctacagcttctacagcagcctaatcagctatgaggaggaccagaggcagggggctgagccaaggaagaactttgtgaagcccaatgaaaccaagacctacttctggaaggtgcagcatcacatggcccctaccaaggatgagtttgactgcaaggcctgggcctacttctctgatgtggacttggagaaggatgtgcactctggcctgattgggcccctgctggtgtgccacaccaacaccctgaaccctgcccatggcaggcaggtgacagtgcaggagtttgccctgttcttcaccatctttgatgagaccaagagctggtactttacagagaacatggagaggaactgcagggccccctgcaacatccagatggaggaccccaccttcaaagagaattacaggttccatgccatcaatggctacatcatggacactctgcctggcctggtcatggcccaggatcagaggatcaggtggtatctgcttagcatgggcagcaatgagaacatccacagcatccacttctctggccatgtgttcacagtgagaaagaaggaggaatacaagatggccctgtataacctgtaccctggggtgtttgagacagtggagatgctgcccagcaaggctggcatctggagggtggaatgcctgattggggagcacctgcatgcaggcatgtctaccctgttcctggtgtacagcaacaagtgccagacccccctgggcatggcatctgggcacatcagggacttccagattacagcctctgggcagtatggccagtgggcacccaagctggccaggctgcactattctggcagcatcaatgcctggagcaccaaggagcccttcagctggataaaggtggacctgctggcccccatgatcattcatggcatcaagacccagggggccaggcagaagttcagcagcctgtacatcagccagttcatcatcatgtactctctggatggcaagaagtggcagacctacagggggaatagcacagggaccctgatggtgttctttggcaatgtggacagctctggcatcaagcacaatatcttcaacccccccatcatagccagatacatcaggctgcaccctacccattacagcatcaggtccaccctgaggatggagctgatgggctgtgatctgaacagctgctccatgcccctgggcatggagagcaaggccatctctgatgcccagatcacagccagcagctacttcaccaatatgtttgccacctggagccccagcaaggcaaggctgcacttgcagggcaggtccaatgcctggaggccccaggtaaacaaccccaaggagtggctgcaggtggactttcagaagaccatgaaggtgacaggggtgaccacccagggggtgaagagcctgctgaccagcatgtatgtgaaggagttcttgatcagcagcagccaggatggccaccagtggaccctgttcttccagaatgggaaggtgaaggtgttccagggcaaccaggacagcttcacccctgtggtgaacagcctggacccccccctgctgaccagatatctgaggatccatccccagagctgggtgcaccagattgctctgaggatggaggttctgggctgtgaagcccaggacctgtactga

SEQ ID NO: 130 - DNA, 4392 bp, Artificial Sequence
  Description of Artificial Sequence: Synthetic polynucleotide
atgcaaatagagctctccacttgtttcttcctctgcttactcaggttctgtttctcagccactaggaggtattacttgggggcagtggagctttcctgggactacatgcaatcagacctgggagaactgcctgtggatgctagatttccacctagagtgccaaagtccttcccctttaacacttcagtggtctataagaagactctgtttgtggagttcactgaccacctctttaacattgcaaagcctaggccaccctggatgggcttacttggccccactattcaggctgaagtctatgacactgtggtgattaccctgaagaacatggcaagccatcctgttagcctccatgcagtgggtgtgtcctattggaaggcttctgagggagctgagtatgatgaccagacctcccaaagggaaaaagaagatgacaaggtgtttccaggaggctcccacacttatgtgtggcaggtcttaaaagagaatgggcctatggcttctgatcccctgtgtttaacctatagttacctgtcacatgttgacctagtgaaagatctcaatagtgggctcattggagccctgctggtttgtagagagggttcactagctaaagaaaagacacaaacattgcacaaattcatcctcttatttgcagtatttgatgaagggaagtcatggcacagtgaaaccaaaaattcattgatgcaggatagagatgctgccagtgccagagcttggcctaaaatgcatacagttaatggttatgtcaataggtctttgcctggtctgataggctgccacagaaagtctgtgtattggcatgtcattgggatgggaaccacccctgaggtgcactctattttcctggaaggccacacctttctggtgaggaaccacaggcaggccagcctggagatcagtcctattacatttctgacagcacagacactgctcatggacctagggcagttcctcctgagctgtcacatcagctctcaccaacatgatggaatggaagcctatgtgaaggtggacagttgtcctgaggagccccagctgagaatgaaaaacaatgaggaggctgaggactatgatgatgacttaacagacagtgaaatggatgttgtcaggtttgatgatgataactcaccaagtttcatacagatcagaagtgtggccaaaaagcatcctaaaacatgggtacactacatagctgcagaggaagaggactgggactatgctccattggttctggccccagatgacagaagctataaaagccagtacctgaataatggaccacagaggattgggaggaagtataagaaggtgaggtttatggcctacactgatgagacctttaagaccagggaagccattcagcatgagtctgggatacttggaccactgctatatggggaggttggagacaccctgctgattattttcaagaatcaggctagcaggccctacaacatctacccccatggtattacagatgtcaggcccctgtactctaggagactacccaagggggtcaagcacttaaaagacttccctatccttccaggagaaattttcaagtacaagtggactgtcactgttgaggatgggccaaccaaatctgatccaagatgcctgaccaggtactattcttcttttgtgaacatggagagggatctagcttcagggctaataggaccattgctgatatgttataaagagagtgttgaccaaagagggaaccaaatcatgtcagataagagaaatgtaattctgttctctgtttttgatgagaacagatcttggtacctcacagaaaacatccaaagatttctccctaacccagctggagtacagttagaagacccagaatttcaggcttctaatatcatgcattcaatcaatggatatgtgtttgatagcttacagctgtctgtctgccttcatgaagtggcctactggtacattctctctattggtgcccaaactgactttctttctgtattcttcagtgggtatactttcaaacacaaaatggtttatgaggataccctgaccttgttccccttttctggggagacagtattcatgagtatggaaaacccaggcctgtggatcctgggttgccataattcagacttcagaaacagggggatgacagctctccttaaggtctcatcctgtgacaaaaacacaggtgactattatgaagatagctatgaggatataagtgcttatctcttatcaaagaataatgccattgaacccaggtcctttagccagaactctaggcacccttccacaaggcagaaacaattcaatgctactaccatacctgagaacacaactctgcagtctgaccaagaagagattgattatgatgacactatctcagtggaaatgaaaaaggaggattttgacatctatgatgaggatgaaaatcaatcacctagatcattccagaagaagacaagacattacttcattgcagcagtggagaggctctgggactatggcatgagttctagcccccatgtccttaggaatagggctcaatcagggtcagtgccccagttcaaaaaggtagtctttcaggagttcacagatggctcttttacacagcccttgtacaggggagagctgaatgagcacctggggctgcttggaccctacatcagggctgaggtggaggataatattatggttacattcaggaaccaagcaagtaggccctacagcttttacagcagcctgatttcttatgaagaagatcagaggcaaggagcagagcccagaaagaactttgtgaagcctaatgaaaccaaaacttacttctggaaggtgcagcatcatatggcccccactaaggatgagtttgactgtaaagcatgggcctatttcagtgatgtggacctggagaaggatgtgcactcaggcctaataggccccctgttggtttgccatacaaacaccctaaacccagctcatggaaggcaggttacagtgcaggaatttgctctatttttcacaatctttgatgagacaaagtcctggtactttacagagaatatggagagaaactgtagggccccatgtaatattcagatggaagacccaactttcaaggagaactacagattccatgccatcaatgggtacatcatggatacactcccagggctggtgatggcccaggatcagaggatcagatggtaccttctctctatgggaagtaatgagaacatccacagcatccatttctcaggccatgtattcactgtaaggaagaaagaagagtacaaaatggccttgtacaacctatatccaggagtctttgagactgtggagatgctgcctagcaaggctggtatctggagagtggagtgcctgattggagagcacctccatgcaggaatgtctacactgtttttggtctacagtaataagtgccagacacccctgggcatggcctctgggcacataagagattttcagattactgccagtggtcaatatggacagtgggcccctaagcttgccagactccattactctggctccatcaatgcatggtctaccaaagaacccttctcttggatcaaagtggacctgctagcccctatgatcatccatggcatcaagacacagggtgccaggcaaaaattttcctcactgtatatcagccagttcattattatgtactctttagatggcaagaagtggcagacatacagaggtaatagcactggtaccctgatggtattctttggtaatgtggatagctctggtatcaaacacaatattttcaacccccctattattgctagatacattagactgcaccctactcactactctattagaagtacactgaggatggaattaatgggctgtgatcttaattcttgcagcatgccacttggcatggagtccaaggccatctcagatgctcagattacagcatcttcctatttcacaaatatgtttgcaacctggagccccagcaaggccagactacatcttcaagggagaagcaatgcatggagaccacaagttaataaccccaaggagtggctacaagtggatttccaaaagacaatgaaagtgactggggtgaccacacagggggttaagtctctcctgacatctatgtatgttaaggagttccttataagcagtagccaggatggacaccaatggacacttttcttccagaatggtaaagtgaaagtattccaaggaaaccaggacagctttactcctgtggttaattctctggatccccccctccttactaggtatcttagaatccatccccaatcctgggtgcaccaaatagcccttaggatggaggtgttaggatgtgaagctcaggatctgtactaa

SEQ ID NO: 131 - DNA, 4392 bp, Artificial Sequence
  Description of Artificial Sequence: Synthetic polynucleotide
atgcagattgagctatcaacatgctttttcttatgccttctcagattctgcttctctgccaccaggaggtactacctgggagcagtggagttgtcttgggactacatgcaatcagacctgggagagctgccagtggatgccaggttcccacccagagtccccaaatccttcccctttaacacctcagttgtttacaaaaagacattatttgtagagttcactgatcatctgttcaatatagctaaacccagacccccctggatgggacttctgggacccaccattcaggctgaggtatatgacactgtggttataaccctgaagaacatggcatcccatccagtgagcctccatgctgttggagtgagttactggaaagcatcagaaggagctgagtatgatgaccagacttcacagagggagaaagaagatgacaaagtcttccctgggggcagtcatacttatgtatggcaagtcttgaaagagaatggtccaatggcctcagacccactgtgtctgacctatagctacctctctcatgtggacttggtaaaagacttgaactctggcctgattggggccctgttggtgtgcagggagggtagcctggccaaggaaaagactcaaaccctacataagttcatcttgctctttgcagtttttgatgaggggaagagttggcacagtgagaccaagaattccctgatgcaggatagagatgctgcatcagctagggcttggcctaaaatgcacacagttaatggatatgtcaatagatcactcccagggctcattggctgccacaggaagtctgtttactggcatgtcatagggatgggcaccacacctgaggtgcatagtatcttcctggaggggcatacctttctggttaggaatcataggcaggccagcctggagatcagcccaattactttcctgactgcccagactttgctcatggatcttggccaatttctcctgagctgccacataagctctcaccagcatgatggaatggaggcctatgttaaggtggatagttgtccagaggaacctcagttgagaatgaaaaataatgaagaggctgaggattatgatgatgatcttacagattctgagatggatgtagtgagatttgatgatgacaattcccctagcttcattcaaatcaggtctgtggctaagaaacatccaaaaacatgggtgcattatatagcagctgaggaagaggactgggactatgctcctctggtgctggcaccagatgatagatcatataagagccagtatctgaacaatggcccccagaggattggcaggaaatataagaaagtaagattcatggcctatacagatgaaaccttcaagacaagagaagcaatacagcatgagtcaggtatcctgggacccctgctatatggagaagtgggagataccttgctcatcatctttaagaaccaagcttctaggccatacaatatctacccccatggcatcacagatgttaggcctctctattccagaagactacccaagggagtcaaacacctgaaggattttcctattctgcctggggagatcttcaaatacaagtggacagttactgtggaggatggccctactaagtctgatcccagatgtcttactagatactacagctcctttgttaacatggaaagggatctggcttctggcctcattggacccctgttgatctgttacaaagaatctgtggatcagaggggaaaccaaatcatgtctgacaagagaaatgtgattctcttctcagtatttgatgagaacaggtcttggtacctgactgaaaacattcagaggttcctgcccaatcctgctggggttcagttagaggatcctgaattccaagcttctaacatcatgcacagtatcaatgggtatgtctttgacagtttgcaactgtcagtgtgtctacatgaggtagcctactggtacatactgagcataggtgcccagacagatttccttagtgtgttcttttcaggctacacattcaagcacaaaatggtgtatgaagataccctcactctgttcccattttctggagagacagtgttcatgtctatggaaaatcctggcctgtggatcctggggtgtcacaactctgactttaggaatagaggcatgacagcactgcttaaggtgtcatcctgtgataagaatactggagactattatgaagattcttatgaggacataagtgcctatcttcttagcaagaataatgccatagagccaaggagcttttctcagaactcaagacaccccagcactaggcaaaagcagttcaatgcaaccaccattccagagaacacaaccttacaatcagatcaggaagaaattgactatgatgacactatctctgtggagatgaagaaggaggactttgatatctatgatgaggatgagaatcagtcccctagatcttttcagaagaaaacaagacactatttcattgcagcagtggagaggctgtgggactatggtatgtcttccagccctcatgtgcttagaaatagggcccagagtggctctgtaccacagtttaaaaaggtggttttccaggaattcactgatgggtctttcactcagcctctctatagaggggagcttaatgagcacttgggtcttctggggccttacattagggctgaagtggaggacaacatcatggtgaccttcaggaatcaagccagcaggccctacagcttctatagttctctgatctcatatgaggaagatcagagacagggagctgagccaaggaaaaattttgtcaagcctaatgagaccaagacatatttttggaaagtgcaacatcacatggcaccaaccaaggatgagtttgattgcaaggcatgggcctacttctcagatgtggacctggaaaaagatgttcactctggacttataggccccctgttagtctgccataccaataccctcaatcctgcacatggtaggcaggttacagtgcaggaatttgcactcttctttactatttttgatgaaactaagagttggtactttactgagaatatggaaagaaattgcagagctccctgcaatatccagatggaagatcctacctttaaagaaaattacagatttcatgcaattaatggttacatcatggatactcttcctgggctagtgatggcccaggaccagagaataagatggtacctgctttcaatgggctccaatgagaatatacactctatccacttctctggacatgtctttacagtcagaaagaaagaagagtataaaatggctttgtacaacctatatccaggggtgtttgaaacagttgagatgctgccctctaaagcaggcatctggagagtggagtgcttaattggggagcatttgcatgctggaatgagtacactgtttctggtctactcaaataagtgtcagactccactaggcatggccagtggtcatatcagagacttccagatcactgcatctggtcagtatggacagtgggctcctaagctggcaaggcttcactatagtggctcaatcaatgcttggagcaccaaggaaccattttcttggattaaggtagacttgcttgctcccatgataattcatggcattaagacacagggggccaggcagaaattttcttcactatatatatcccaattcatcatcatgtatagcttggatgggaagaaatggcaaacatatagaggaaatagcactggcaccctaatggttttctttggcaatgttgactcctctgggatcaaacacaatatttttaacccccctattattgccagatacattagactgcaccctacccactactccataaggagcacactcaggatggaattgatggggtgtgacctcaactcctgcagtatgccattgggtatggagtctaaggccatctctgatgcccaaatcacagcatcctcatacttcaccaatatgtttgctacatggtccccttctaaggctagacttcacctgcagggcaggtctaatgcttggagaccacaggtgaacaacccaaaggaatggctgcaagtggatttccagaaaaccatgaaagtcacaggagttactacacagggtgtgaagtctttgctgacatcaatgtatgtcaaagaatttctcatttcttcctcccaagatggccatcagtggactctgttcttccagaatggcaaggtgaaagtcttccaaggaaaccaggacagtttcaccccagtggtgaactctctggacccacccctgctaaccaggtacctgaggatccatccccagagttgggttcatcagattgcattgagaatggaagtgcttgggtgtgaggcccaggacttgtattag

SEQ ID NO: 132 - DNA, 4392 bp, Artificial Sequence
  Description of Artificial Sequence: Synthetic polynucleotide
atgcagattgagctctccacctgcttctttctctgcttgctgagattctgcttctctgctacaaggagatattaccttggagctgtagagctgtcatgggactacatgcagtctgatttgggggaactgcctgttgatgccaggtttcccccaagagtgcccaagtcattcccctttaacacatcagtggtatacaaaaagacactttttgtggagttcactgaccaccttttcaatattgccaagcccaggcctccctggatgggcctcctgggcccaaccatccaagcagaagtgtatgacactgttgttataacactcaaaaacatggcctcccatcctgtgtccctccatgctgtgggggtctcatactggaaagcctcagagggggctgagtatgatgaccagacctcacagagggaaaaggaggatgacaaggtcttccctggaggctcccacacttatgtttggcaagtgttgaaggagaatggccccatggcctctgaccccctttgtcttacatactcatacttgagtcatgtggatttggtcaaagacctgaactctggtttgattggggccctgctggtttgcagggagggctccctggccaaagaaaagacacaaaccctccacaagttcattctgctctttgcagtgtttgatgaagggaagagctggcattcagagaccaagaacagtctcatgcaggacagggatgctgcaagtgcaagggcttggccaaagatgcacactgtgaatggatatgtcaacaggagcttgcctggactcataggttgccacaggaagtcagtttactggcatgtgataggaatggggacaactcctgaggtccactctatatttttagagggacacacattcctggtcaggaaccacaggcaggccagcttagagatcagtcccattacattcctaacagcccagacacttctgatggacctgggccagttcctgctgagttgccatatcagcagccaccagcatgatggtatggaagcctatgttaaagtggactcctgcccagaggagccccagctcaggatgaagaacaatgaagaggctgaagactatgatgatgacctgactgattctgaaatggatgtggtgaggtttgatgatgacaattccccttccttcatccaaataaggtcagtagccaaaaagcacccaaaaacctgggtgcactacatagctgctgaggaggaggactgggactatgcaccattagtactggcacctgatgacaggtcctacaaaagccagtacttaaacaatggtccccaaaggattgggaggaaatataaaaaggtcaggtttatggcctacactgatgaaaccttcaagaccagagaggccattcagcatgagtctggtattcttggacccctgctgtatggggaagtgggggacaccctcttgatcatctttaagaaccaggcctccagaccatacaatatctaccctcatggaatcactgatgtgaggcctctctattcaagaaggttgcccaaaggggtcaaacatctcaaagacttcccaatccttcctggtgaaatcttcaaatacaagtggactgtcactgtagaagatggaccaacaaagtctgacccaaggtgtctcaccagatactactcttcatttgtgaacatggagagggacctggcatctggtctgataggcccattactgatctgctacaaagaatctgtagatcagaggggcaatcagattatgtcagacaagaggaatgttatcctcttctctgtttttgatgaaaacaggagctggtaccttactgagaatatccaaaggttcctgccaaacccagctggggttcagctggaggaccctgagttccaggcttccaacattatgcacagcattaatggctatgtctttgactcactgcagctgtcagtctgcctgcatgaagtggcttattggtacattctgagcataggggcccagactgactttttaagtgtgtttttctctggatataccttcaaacacaaaatggtgtatgaggacaccctcacactcttcccattttctggggagactgttttcatgtccatggagaaccctggcctttggattttaggctgtcacaactcagactttaggaataggggcatgactgccctccttaaagtctcatcctgtgacaaaaacactggggactactatgaagacagctatgaggacatatctgcttatctgctgagcaagaacaatgcaattgagcctaggtccttcagccaaaattctaggcaccccagtaccaggcagaaacaattcaatgccaccacaatcccagagaataccacactgcagagtgatcaagaagagattgattatgatgacactatatcagtagaaatgaagaaagaggactttgacatctatgatgaggatgaaaaccagagtcccaggtcatttcagaagaagaccaggcactacttcattgctgctgtagaaaggctctgggactatggaatgtccagcagcccacatgtgctaaggaatagggcacagagtggatctgtgccacagtttaagaaggtggtgttccaggagttcactgatggctccttcacacagcccctgtacagaggggaactgaatgagcatcttggacttctgggcccctacatcagggctgaggtggaggataacatcatggtgaccttcaggaaccaggcctccagaccctactcattctatagttctctgatctcctatgaagaggatcagagacaaggtgctgagcctaggaagaactttgttaagccaaatgaaacaaagacctacttctggaaggttcagcaccacatggcccctacaaaggatgaatttgactgcaaagcatgggcctacttttctgatgtggacttggaaaaagatgtccactcaggacttattggcccacttctggtctgtcacacaaatacactgaaccctgcacatggcaggcaggtgacagtccaggagtttgctttgttctttaccatctttgatgaaacaaagtcctggtattttactgagaacatggaaaggaactgcagggccccatgcaatatccaaatggaggacccaacattcaaggaaaactacaggttccatgcaatcaatggttatattatggacaccttgcctggcttagtcatggcacaggaccagaggattaggtggtacctgctgtctatgggaagtaatgaaaacatacacagcatccatttctctggccatgtgtttacagtcaggaagaaagaggagtataagatggccttatacaacttgtaccctggggtgtttgaaactgtagaaatgctcccctccaaagctggcatttggagggtggaatgtctgataggggagcacctgcatgctgggatgagcaccttattcctggtgtacagcaataagtgtcaaacccccctgggaatggcatctggacacatcagggacttccagatcactgccagtggtcagtatggccagtgggcccctaagctagccaggctccactactctggctcaatcaatgcctggagcactaaggagccattcagctggatcaaagtggacctgttagcccccatgattattcatggaatcaagacccagggtgccaggcagaaattctcctcactatatatcagccagtttatcatcatgtacagtctggatgggaaaaagtggcaaacctataggggcaacagtactggcaccttgatggtgttctttggcaatgtggacagttcaggaatcaaacataacatctttaaccctcctatcattgccagatacatcagactgcaccccacacactactccataaggagtaccctgaggatggaactcatgggctgtgatctcaatagctgtagcatgcctctgggcatggagagcaaagcaatctctgatgcccagattactgctagcagttatttcaccaacatgtttgcaacctggagcccctctaaggcaaggttgcacctccaaggcagaagcaatgcatggaggccccaggtcaacaaccccaaagagtggctccaggttgattttcagaaaaccatgaaggtgacaggggttaccacccagggggtaaagagcctactaaccagcatgtatgtgaaagagttcctgatctcatccagccaggatgggcaccaatggaccctgttctttcaaaatggaaaggttaaggtctttcaaggtaatcaggactcctttacacctgtggtgaactccttggatcccccacttctaaccagatacctgaggattcatcctcagagttgggtccaccagattgcccttaggatggaagtcttgggttgtgaagcccaagacttgtactga

SEQ ID NO: 133 - DNA, 4392 bp, Artificial Sequence
  Description of Artificial Sequence: Synthetic polynucleotide
atgcagatagagctgagcacctgcttcttcttatgcttgctgaggttctgcttctcagccaccaggagatattacctgggggctgtggagctgagctgggactacatgcagtcagaccttggggagttacctgtggatgccaggttcccccctagagtgcccaagagcttccccttcaacacctctgtggtgtacaagaagacactgtttgtagagttcacagaccacctgttcaacattgccaagccaaggcccccttggatgggcctgcttggccctaccatacaggctgaggtgtatgacacagttgtcatcactctcaagaacatggcctcccatcctgtgagcctgcatgcagtgggggtgagctattggaaggcctctgagggggctgagtatgatgatcagacctcccagagggagaaggaggatgacaaggtgttccctggtggcagccacacttatgtgtggcaggtgctgaaggagaatggccccatggcctcagaccctctgtgtctgacctacagctacctgtcccatgtggatcttgtaaaagacctgaactcaggtctgattggggccctgctggtgtgcagggagggcagtctggccaaagagaagacccagaccttgcacaaattcatccttctgtttgctgtgtttgatgaagggaagagctggcactctgagaccaagaacagcctgatgcaggacagggatgcagccagtgccagggcttggcccaagatgcacacagtcaatggctatgtgaacaggagcctccctggcctgattggctgccataggaagtctgtatactggcatgtgattggtatggggaccaccccagaggtgcacagcatcttccttgaagggcacaccttcctggtgaggaatcacaggcaggccagcctggagatttctcccatcacattcctcactgcccagaccctgctgatggatctgggacagttcctgctgagttgccacatcagcagccaccagcatgatggcatggaggcctatgtgaaggtggacagctgtccagaggagccacagctgaggatgaagaacaatgaggaggctgaggattatgatgatgacctgactgattcagagatggatgtagtcaggtttgatgatgacaacagcccctccttcatccagatcaggtcagtggccaagaagcacccaaagacttgggtgcattacatagctgctgaggaggaggattgggactatgcccccttagtgctggctcctgatgacaggagctacaagagccagtatctgaataatggcccccagaggattggaaggaagtataagaaggtcagattcatggcctatactgatgagactttcaagactagggaggccattcagcatgagtctggcatcttgggccccctgctgtatggggaggtgggggacaccctcttgatcatcttcaagaaccaggccagcaggccttacaacatctacccccatggcatcactgatgtgaggccattgtacagcaggaggctgcctaagggggtaaagcatctgaaggatttcccaatcctccctggtgagatcttcaagtacaagtggactgtgacagtggaggatggccccactaagtcagatccaaggtgcctcaccagatactacagcagctttgtgaatatggagagggacttggccagtggcctgattggtccccttctgatctgctacaaggagtcagtagatcagagggggaatcagatcatgtctgataagaggaatgtgatcctgttctcagtgtttgatgagaacaggagctggtacctgactgagaacatccagaggttcctgcctaatccagctggagtccagctggaggatcctgagtttcaggccagcaacatcatgcacagcatcaatggctatgtgtttgacagcttacagctgtcagtgtgcctgcatgaggtggcttactggtacatcctcagcataggagcacagacagactttctgtctgtgttctttagtggctacaccttcaagcacaagatggtgtatgaggacaccctcaccctgttccccttcagtggtgagacagtgttcatgagcatggagaatccagggctctggatactgggttgccacaactctgatttcaggaacaggggcatgactgccctcctgaaggtctccagctgtgacaagaacactggagactattatgaggacagttatgaggacatctcagcatacctgctgagcaagaacaatgccattgagcccagaagcttcagccagaactctaggcaccctagcactaggcagaagcagttcaatgccactaccatcccagagaataccacattacagtctgaccaggaggagatagactatgatgacaccatctctgtggagatgaagaaggaggactttgacatctatgatgaggatgagaaccagagccccagatccttccagaagaagaccaggcactacttcatagctgctgttgagaggctgtgggactatgggatgtccagcagccctcatgtgctgaggaacagagcccagtctggctctgttcctcagttcaagaaggttgtgttccaggagttcactgatgggtccttcacccagcccttgtatagaggtgagctgaatgagcacctgggccttctgggcccctatataagggctgaggtggaggacaacatcatggtgaccttcaggaaccaggccagcaggccttacagcttctacagcagcctgatcagctatgaagaggaccagaggcagggggctgagccaaggaagaactttgtgaagcccaatgaaacaaagacttacttctggaaggtgcagcaccacatggccccaacaaaggatgagtttgactgcaaggcctgggcctacttctctgatgtggaccttgagaaagatgtccactctggcctgattggccccctgctggtgtgccacaccaacacactgaatcctgcccatggcaggcaggtgacagtgcaggagtttgcactgttcttcaccatctttgatgagaccaagagttggtacttcacagagaacatggagaggaactgcagggccccatgcaacatccagatggaggaccctaccttcaaggagaactataggttccatgccatcaatgggtacatcatggacaccctgcctggccttgtgatggcccaggatcagagaattaggtggtacctgctgagcatgggctctaatgagaacatccacagcatccacttctctgggcatgtgttcactgtgaggaagaaggaggagtacaagatggccctgtacaacttgtaccctggggtgtttgagactgtggagatgctgccatctaaggcagggatctggagggtggagtgcctgattggagagcatctccatgcaggcatgtccaccctgttcctggtgtactccaacaagtgccagacccctctggggatggcatctggacacatcagggacttccagatcactgccagtgggcagtatggccagtgggcccccaagctggccaggctgcactacagtggcagcatcaatgcctggagcaccaaagagcccttctcatggataaaggtggacctgctggcccctatgattatccatgggatcaagactcagggtgccaggcagaagttctcctccctgtatattagccagttcatcatcatgtactcacttgatggcaagaagtggcaaacatacagggggaactctactggcaccctgatggtgttctttggcaatgttgactccagtggcattaagcacaatatcttcaatccacctatcatagccagatacatcaggctgcaccccacccactactcaatcaggagcaccctgagaatggagctgatgggctgtgacttgaatagttgcagcatgcctctgggcatggagagcaaggccatctctgatgcccagatcacagccagcagctacttcactaatatgtttgccacctggagccccagcaaggccaggctgcacttgcaggggaggagcaatgcctggaggccacaggtgaacaaccccaaggagtggctgcaggtggatttccagaagaccatgaaggtcactggagttaccacccagggggtgaagagcctcctgaccagcatgtatgtgaaggagttcttgatcagctctagccaggatggtcaccagtggaccctattcttccagaatgggaaggtgaaggtgttccagggcaaccaggacagcttcaccccagtggtgaacagcctggatcctcctctgttaaccagatacctgaggatccatcctcagagctgggtacaccagattgctctgaggatggaggtcctgggctgtgaagcccaggacctgtactga

SEQ ID NO: 134 - DNA, 4392 bp, Artificial Sequence
  Description of Artificial Sequence: Synthetic polynucleotide
atgcagattgagctgagcacctgtttcttcctgtgccttctgaggttctgcttcagtgccaccaggaggtactacctgggggcagtggagctgagctgggactacatgcagtctgacctgggtgagctgcctgtggatgccaggttcccccccagagtgcctaagagcttccccttcaacacctctgtggtgtacaagaagacactgtttgtggagttcacagaccacctgttcaacattgccaagcccaggcctccctggatggggctgctgggccccactatccaggcagaggtgtatgacactgtggtcatcactctgaagaacatggccagtcaccctgtgagcctgcatgcagtgggggtgagctactggaaggcctctgagggggctgagtatgatgaccagacctctcagagggagaaggaggatgacaaggtgttccctgggggcagccacacctatgtgtggcaggtgctgaaggagaatggccccatggccagtgaccccctgtgcctgacctacagctacctgagccatgtggatctggtgaaggacctgaactcaggcctgataggggccctgctggtgtgcagggagggcagcctggccaaggagaagacccagaccttgcacaagttcatcctgctgtttgctgtgtttgatgaggggaagtcctggcactcagagaccaagaacagcctgatgcaggacagggatgctgcctctgccagggcctggcccaagatgcacacagtgaatggctatgtgaacaggtcactgccaggcctgattggctgccacaggaagtcagtgtactggcatgtgattggcatgggcaccacccctgaggtgcacagcatctttctggagggccacaccttcctggtgaggaaccacaggcaggccagcctggagatctctccaatcacattcctcactgcccagaccctgctgatggatctgggccagttcctgctgagctgccacatcagcagccaccagcatgatggcatggaggcctatgtgaaggtggacagctgtccagaggagccacagctgaggatgaagaacaatgaggaggctgaggattatgatgatgacctgactgactctgagatggatgtggtcaggtttgatgatgacaacagcccctccttcatccagatcaggtcagtggccaagaagcaccctaagacctgggtgcactacattgctgctgaggaggaggactgggactatgcccccctggtgctggctcctgatgacaggagctacaagagccagtacctcaataatggcccccagaggattggcaggaagtacaagaaggtgaggttcatggcctacactgatgagactttcaagaccagggaggccatccagcatgagtctggcatcctgggccccctgctgtatggggaggtgggggacaccctgctgatcatcttcaagaatcaggcctccaggccttacaacatctatccccatgggatcactgatgtgaggcctctgtacagcaggaggctgcccaagggtgtgaagcatctgaaggattttcccatcctccctggtgagatcttcaagtacaagtggactgtgactgtggaggatggccccaccaagtcagatcccaggtgcctcaccagatactacagcagctttgtgaacatggagagggacttggccagtggcctgattgggcccctgctgatctgctacaaggagtcagtggatcagaggggcaatcagatcatgtctgataagaggaatgtgatcctgttctcagtgtttgatgagaacaggagctggtacctgactgagaacattcagaggttcctgcccaatccagctggggtgcagctggaggatcctgagttccaggcttccaacatcatgcacagcatcaatggctatgtgtttgacagcctgcagctgtcagtgtgcctgcatgaggtggcctactggtacattctgagcattggggcacagacagacttcctgtctgtgttcttctctggttacaccttcaagcacaagatggtgtatgaggacaccctcactctgtttcccttttctggtgagactgtgttcatgagcatggagaatcctggcctgtggatcctgggctgtcacaacagtgacttcaggaataggggcatgacagccctcctgaaggtctccagctgtgacaagaacactggagactactatgaggacagctatgaggacatctctgcctacctgctgtccaagaataatgccatagagcccaggtccttcagccagaattctaggcacccaagtaccaggcagaagcagttcaatgccaccaccatccctgagaacaccacactgcagtctgaccaggaggagatagactatgatgacaccatctctgtggagatgaagaaggaggactttgacatctatgatgaggatgagaaccagagccccaggagcttccagaagaagaccaggcactacttcattgctgctgtggagaggctgtgggactatggcatgagcagctcacctcatgtgctgaggaacagagcccagtctggctctgttcctcagttcaagaaggtggtgttccaggagttcactgatgggtccttcacccagcccctgtacaggggtgagctgaatgagcacctggggctgctgggcccctacatcagggctgaggtggaggacaacatcatggtgaccttcaggaaccaggccagcaggccctacagcttctacagcagcctgatctcctatgaggaggatcagaggcagggggctgagccaaggaagaactttgtgaagcccaatgagaccaagacctacttctggaaggtgcagcaccacatggcccccaccaaggatgaatttgattgcaaggcctgggcctacttctctgatgtggatctggagaaggatgtgcacagtgggctgattggcccactgctggtgtgccacaccaacaccctgaaccctgcccatggcaggcaggtgacagtgcaggagtttgccctgttcttcaccatctttgatgagaccaagagctggtacttcacagagaacatggagaggaactgcagggccccctgcaacatccagatggaggaccccaccttcaaggagaactacaggttccatgccatcaatggctacatcatggatactctgcctgggctggtcatggcccaggaccagaggatcagatggtacctgctgagcatgggcagcaatgagaacatccacagcatccacttcagtggccatgtgttcactgtgagaaagaaggaggaatacaagatggccctgtacaacctgtaccctggagtgtttgagactgtggagatgctgcccagcaaggcaggtatctggagggtggagtgcctgattggagagcacctccatgcaggcatgtccaccctgttcctggtgtacagcaacaagtgccagacccccctgggcatggcatctggccacatcagggacttccagatcacagcctctggccagtatggccagtgggcccccaagctggccaggctgcactactctggcagcatcaatgcctggagcacaaaggagcccttcagctggatcaaggtggacctgctggcccccatgatcatccatgggatcaagacccagggtgccaggcagaagttcagctccctgtatatcagccagttcatcatcatgtacagtctggatggcaagaagtggcagacctacaggggcaactctactggcaccctgatggtgttctttggcaatgtggactccagtggcattaagcacaacatcttcaatccacccatcattgccagatacatcaggctgcaccccacccactacagcatcaggtccaccctgaggatggagctgatggggtgtgacctgaatagctgtagtatgcccctgggcatggagagcaaggccatctctgatgcccagatcactgccagcagctacttcaccaatatgtttgccacctggagcccctcaaaggccaggctgcatctgcagggcaggagcaatgcctggaggccccaggtgaacaaccccaaggagtggctgcaggtggacttccagaagaccatgaaggtcactggagtgaccacccagggggtgaagagcctcctgaccagcatgtatgtgaaggagttcctgatcagcagcagccaggatgggcaccagtggaccctgttcttccagaatgggaaggtgaaggtgttccagggcaaccaggacagcttcaccccagtggtgaacagcctggaccctcccctgctgaccagatatctgaggatccaccctcagagctgggtgcaccagattgccctgaggatggaggtcctgggctgtgaggcccaggacctctactga

SEQ ID NO: 135 - DNA, 4392 bp, Artificial Sequence
  Description of Artificial Sequence: Synthetic polynucleotide
atgcaaatagagctctccacttgtttcttcctctgcttactcaggttctgtttctcagccactaggaggtattacttgggggcagtggagctttcctgggactacatgcaatcagacctgggagaactgcctgtggatgctagatttccacctagagtgccaaagtccttcccctttaacacttcagtggtctataagaagactctgtttgtggagttcactgaccacctctttaacattgcaaagcctaggccaccctggatgggcttacttggccccactattcaggctgaagtctatgacactgtggtgattaccctgaagaacatggcaagccatcctgttagcctccatgcagtgggtgtgtcctattggaaggcttctgagggagctgagtatgatgaccagacctcccaaagggaaaaagaagatgacaaggtgtttccaggaggctcccacacttatgtgtggcaggtcttaaaagagaatgggcctatggcttctgatcccctgtgtttaacctatagttacctgtcacatgttgacctagtgaaagatctcaatagtgggctcattggagccctgctggtttgtagagagggttcactagctaaagaaaagacacaaacattgcacaaattcatcctcttatttgcagtatttgatgaagggaagtcatggcacagtgaaaccaaaaattcattgatgcaggatagagatgctgccagtgccagagcttggcctaaaatgcatacagttaatggttatgtcaataggtctttgcctggtctgataggctgccacagaaagtctgtgtattggcatgtcattgggatgggaaccacccctgaggtgcactctattttcctggaaggccacacctttctggtgaggaaccacaggcaggccagcctggagatcagtcctattacatttctgacagcacagacactgctcatggacctagggcagttcctcctgttctgtcacatcagctctcaccaacatgatggaatggaagcctatgtgaaggtggacagttgtcctgaggagccccagctgagaatgaaaaacaatgaggaggctgaggactatgatgatgacttaacagacagtgaaatggatgttgtcaggtttgatgatgataactcaccaagtttcatacagatcagaagtgtggccaaaaagcatcctaaaacatgggtacactacatagctgcagaggaagaggactgggactatgctccattggttctggccccagatgacagaagctataaaagccagtacctgaataatggaccacagaggattgggaggaagtataagaaggtgaggtttatggcctacactgatgagacctttaagaccagggaagccattcagcatgagtctgggatacttggaccactgctatatggggaggttggagacaccctgctgattattttcaagaatcaggctagcaggccctacaacatctacccccatggtattacagatgtcaggcccctgtactctaggagactacccaagggggtcaagcacttaaaagacttccctatccttccaggagaaattttcaagtacaagtggactgtcactgttgaggatgggccaaccaaatctgatccaagatgcctgaccaggtactattcttcttttgtgaacatggagagggatctagcttcagggctaataggaccattgctgatatgttataaagagagtgttgaccaaagagggaaccaaatcatgtcagataagagaaatgtaattctgttctctgtttttgatgagaacagatcttggtacctcacagaaaacatccaaagatttctccctaacccagctggagtacagttagaagacccagaatttcaggcttctaatatcatgcattcaatcaatggatatgtgtttgatagcttacagctgtctgtctgccttcatgaagtggcctactggtacattctctctattggtgcccaaactgactttctttctgtattcttcagtgggtatactttcaaacacaaaatggtttatgaggataccctgaccttgttccccttttctggggagacagtattcatgagtatggaaaacccaggcctgtggatcctgggttgccataattcagacttcagaaacagggggatgacagctctccttaaggtctcatcctgtgacaaaaacacaggtgactattatgaagatagctatgaggatataagtgcttatctcttatcaaagaataatgccattgaacccaggtcctttagccagaactctaggcacccttccacaaggcagaaacaattcaatgctactaccatacctgagaacacaactctgcagtctgaccaagaagagattgattatgatgacactatctcagtggaaatgaaaaaggaggattttgacatctatgatgaggatgaaaatcaatcacctagatcattccagaagaagacaagacattacttcattgcagcagtggagaggctctgggactatggcatgagttctagcccccatgtccttaggaatagggctcaatcagggtcagtgccccagttcaaaaaggtagtctttcaggagttcacagatggctcttttacacagcccttgtacaggggagagctgaatgagcacctggggctgcttggaccctacatcagggctgaggtggaggataatattatggttacattcaggaaccaagcaagtaggccctacagcttttacagcagcctgatttcttatgaagaagatcagaggcaaggagcagagcccagaaagaactttgtgaagcctaatgaaaccaaaacttacttctggaaggtgcagcatcatatggcccccactaaggatgagtttgactgtaaagcatgggcctatttcagtgatgtggacctggagaaggatgtgcactcaggcctaataggccccctgttggtttgccatacaaacaccctaaacccagctcatggaaggcaggttacagtgcaggaatttgctctatttttcacaatctttgatgagacaaagtcctggtactttacagagaatatggagagaaactgtagggccccatgtaatattcagatggaagacccaactttcaaggagaactacagattccatgccatcaatgggtacatcatggatacactcccagggctggtgatggcccaggatcagaggatcagatggtaccttctctctatgggaagtaatgagaacatccacagcatccatttctcaggccatgtattcactgtaaggaagaaagaagagtacaaaatggccttgtacaacctatatccaggagtctttgagactgtggagatgctgcctagcaaggctggtatctggagagtggagtgcctgattggagagcacctccatgcaggaatgtctacactgtttttggtctacagtaataagtgccagacacccctgggcatggcctctgggcacataagagattttcagattactgccagtggtcaatatggacagtgggcccctaagcttgccagactccattactctggctccatcaatgcatggtctaccaaagaacccttctcttggatcaaagtggacctgctagcccctatgatcatccatggcatcaagacacagggtgccaggcaaaaattttcctcactgtatatcagccagttcattattatgtactctttagatggcaagaagtggcagacatacagaggtaatagcactggtaccctgatggtattctttggtaatgtggatagctctggtatcaaacacaatattttcaacccccctattattgctagatacattagactgcaccctactcactactctattagaagtacactgaggatggaattaatgggctgtgatcttaattcttgcagcatgccacttggcatggagtccaaggccatctcagatgctcagattacagcatcttcctatttcacaaatatgtttgcaacctggagccccagcaaggccagactacatcttcaagggagaagcaatgcatggagaccacaagttaataaccccaaggagtggctacaagtggatttccaaaagacaatgaaagtgactggggtgaccacacagggggttaagtctctcctgacatctatgtatgttaaggagttccttataagcagtagccaggatggacaccaatggacacttttcttccagaatggtaaagtgaaagtattccaaggaaaccaggacagctttactcctgtggttaattctctggatccccccctccttactaggtatcttagaatccatccccaatcctgggtgcaccaaatagcccttaggatggaggtgttaggatgtgaagctcaggatctgtactaa

SEQ ID NO: 136 - DNA, 4392 bp, Artificial Sequence
  Description of Artificial Sequence: Synthetic polynucleotide
atgcagattgagctatcaacatgctttttcttatgccttctcagattctgcttctctgccaccaggaggtactacctgggagcagtggagttgtcttgggactacatgcaatcagacctgggagagctgccagtggatgccaggttcccacccagagtccccaaatccttcccctttaacacctcagttgtttacaaaaagacattatttgtagagttcactgatcatctgttcaatatagctaaacccagacccccctggatgggacttctgggacccaccattcaggctgaggtatatgacactgtggttataaccctgaagaacatggcatcccatccagtgagcctccatgctgttggagtgagttactggaaagcatcagaaggagctgagtatgatgaccagacttcacagagggagaaagaagatgacaaagtcttccctgggggcagtcatacttatgtatggcaagtcttgaaagagaatggtccaatggcctcagacccactgtgtctgacctatagctacctctctcatgtggacttggtaaaagacttgaactctggcctgattggggccctgttggtgtgcagggagggtagcctggccaaggaaaagactcaaaccctacataagttcatcttgctctttgcagtttttgatgaggggaagagttggcacagtgagaccaagaattccctgatgcaggatagagatgctgcatcagctagggcttggcctaaaatgcacacagttaatggatatgtcaatagatcactcccagggctcattggctgccacaggaagtctgtttactggcatgtcatagggatgggcaccacacctgaggtgcatagtatcttcctggaggggcatacctttctggttaggaatcataggcaggccagcctggagatcagcccaattactttcctgactgcccagactttgctcatggatcttggccaatttctcctgttctgccacataagctctcaccagcatgatggaatggaggcctatgttaaggtggatagttgtccagaggaacctcagttgagaatgaaaaataatgaagaggctgaggattatgatgatgatcttacagattctgagatggatgtagtgagatttgatgatgacaattcccctagcttcattcaaatcaggtctgtggctaagaaacatccaaaaacatgggtgcattatatagcagctgaggaagaggactgggactatgctcctctggtgctggcaccagatgatagatcatataagagccagtatctgaacaatggcccccagaggattggcaggaaatataagaaagtaagattcatggcctatacagatgaaaccttcaagacaagagaagcaatacagcatgagtcaggtatcctgggacccctgctatatggagaagtgggagataccttgctcatcatctttaagaaccaagcttctaggccatacaatatctacccccatggcatcacagatgttaggcctctctattccagaagactacccaagggagtcaaacacctgaaggattttcctattctgcctggggagatcttcaaatacaagtggacagttactgtggaggatggccctactaagtctgatcccagatgtcttactagatactacagctcctttgttaacatggaaagggatctggcttctggcctcattggacccctgttgatctgttacaaagaatctgtggatcagaggggaaaccaaatcatgtctgacaagagaaatgtgattctcttctcagtatttgatgagaacaggtcttggtacctgactgaaaacattcagaggttcctgcccaatcctgctggggttcagttagaggatcctgaattccaagcttctaacatcatgcacagtatcaatgggtatgtctttgacagtttgcaactgtcagtgtgtctacatgaggtagcctactggtacatactgagcataggtgcccagacagatttccttagtgtgttcttttcaggctacacattcaagcacaaaatggtgtatgaagataccctcactctgttcccattttctggagagacagtgttcatgtctatggaaaatcctggcctgtggatcctggggtgtcacaactctgactttaggaatagaggcatgacagcactgcttaaggtgtcatcctgtgataagaatactggagactattatgaagattcttatgaggacataagtgcctatcttcttagcaagaataatgccatagagccaaggagcttttctcagaactcaagacaccccagcactaggcaaaagcagttcaatgcaaccaccattccagagaacacaaccttacaatcagatcaggaagaaattgactatgatgacactatctctgtggagatgaagaaggaggactttgatatctatgatgaggatgagaatcagtcccctagatcttttcagaagaaaacaagacactatttcattgcagcagtggagaggctgtgggactatggtatgtcttccagccctcatgtgcttagaaatagggcccagagtggctctgtaccacagtttaaaaaggtggttttccaggaattcactgatgggtctttcactcagcctctctatagaggggagcttaatgagcacttgggtcttctggggccttacattagggctgaagtggaggacaacatcatggtgaccttcaggaatcaagccagcaggccctacagcttctatagttctctgatctcatatgaggaagatcagagacagggagctgagccaaggaaaaattttgtcaagcctaatgagaccaagacatatttttggaaagtgcaacatcacatggcaccaaccaaggatgagtttgattgcaaggcatgggcctacttctcagatgtggacctggaaaaagatgttcactctggacttataggccccctgttagtctgccataccaataccctcaatcctgcacatggtaggcaggttacagtgcaggaatttgcactcttctttactatttttgatgaaactaagagttggtactttactgagaatatggaaagaaattgcagagctccctgcaatatccagatggaagatcctacctttaaagaaaattacagatttcatgcaattaatggttacatcatggatactcttcctgggctagtgatggcccaggaccagagaataagatggtacctgctttcaatgggctccaatgagaatatacactctatccacttctctggacatgtctttacagtcagaaagaaagaagagtataaaatggctttgtacaacctatatccaggggtgtttgaaacagttgagatgctgccctctaaagcaggcatctggagagtggagtgcttaattggggagcatttgcatgctggaatgagtacactgtttctggtctactcaaataagtgtcagactccactaggcatggccagtggtcatatcagagacttccagatcactgcatctggtcagtatggacagtgggctcctaagctggcaaggcttcactatagtggctcaatcaatgcttggagcaccaaggaaccattttcttggattaaggtagacttgcttgctcccatgataattcatggcattaagacacagggggccaggcagaaattttcttcactatatatatcccaattcatcatcatgtatagcttggatgggaagaaatggcaaacatatagaggaaatagcactggcaccctaatggttttctttggcaatgttgactcctctgggatcaaacacaatatttttaacccccctattattgccagatacattagactgcaccctacccactactccataaggagcacactcaggatggaattgatggggtgtgacctcaactcctgcagtatgccattgggtatggagtctaaggccatctctgatgcccaaatcacagcatcctcatacttcaccaatatgtttgctacatggtccccttctaaggctagacttcacctgcagggcaggtctaatgcttggagaccacaggtgaacaacccaaaggaatggctgcaagtggatttccagaaaaccatgaaagtcacaggagttactacacagggtgtgaagtctttgctgacatcaatgtatgtcaaagaatttctcatttcttcctcccaagatggccatcagtggactctgttcttccagaatggcaaggtgaaagtcttccaaggaaaccaggacagtttcaccccagtggtgaactctctggacccacccctgctaaccaggtacctgaggatccatccccagagttgggttcatcagattgcattgagaatggaagtgcttgggtgtgaggcccaggacttgtattag

SEQ ID NO: 137 - DNA, 4392 bp, Artificial Sequence
  Description of Artificial Sequence: Synthetic polynucleotide
atgcagattgagctctccacctgcttctttctctgcttgctgagattctgcttctctgctacaaggagatattaccttggagctgtagagctgtcatgggactacatgcagtctgatttgggggaactgcctgttgatgccaggtttcccccaagagtgcccaagtcattcccctttaacacatcagtggtatacaaaaagacactttttgtggagttcactgaccaccttttcaatattgccaagcccaggcctccctggatgggcctcctgggcccaaccatccaagcagaagtgtatgacactgttgttataacactcaaaaacatggcctcccatcctgtgtccctccatgctgtgggggtctcatactggaaagcctcagagggggctgagtatgatgaccagacctcacagagggaaaaggaggatgacaaggtcttccctggaggctcccacacttatgtttggcaagtgttgaaggagaatggccccatggcctctgaccccctttgtcttacatactcatacttgagtcatgtggatttggtcaaagacctgaactctggtttgattggggccctgctggtttgcagggagggctccctggccaaagaaaagacacaaaccctccacaagttcattctgctctttgcagtgtttgatgaagggaagagctggcattcagagaccaagaacagtctcatgcaggacagggatgctgcaagtgcaagggcttggccaaagatgcacactgtgaatggatatgtcaacaggagcttgcctggactcataggttgccacaggaagtcagtttactggcatgtgataggaatggggacaactcctgaggtccactctatatttttagagggacacacattcctggtcaggaaccacaggcaggccagcttagagatcagtcccattacattcctaacagcccagacacttctgatggacctgggccagttcctgctgttctgccatatcagcagccaccagcatgatggtatggaagcctatgttaaagtggactcctgcccagaggagccccagctcaggatgaagaacaatgaagaggctgaagactatgatgatgacctgactgattctgaaatggatgtggtgaggtttgatgatgacaattccccttccttcatccaaataaggtcagtagccaaaaagcacccaaaaacctgggtgcactacatagctgctgaggaggaggactgggactatgcaccattagtactggcacctgatgacaggtcctacaaaagccagtacttaaacaatggtccccaaaggattgggaggaaatataaaaaggtcaggtttatggcctacactgatgaaaccttcaagaccagagaggccattcagcatgagtctggtattcttggacccctgctgtatggggaagtgggggacaccctcttgatcatctttaagaaccaggcctccagaccatacaatatctaccctcatggaatcactgatgtgaggcctctctattcaagaaggttgcccaaaggggtcaaacatctcaaagacttcccaatccttcctggtgaaatcttcaaatacaagtggactgtcactgtagaagatggaccaacaaagtctgacccaaggtgtctcaccagatactactcttcatttgtgaacatggagagggacctggcatctggtctgataggcccattactgatctgctacaaagaatctgtagatcagaggggcaatcagattatgtcagacaagaggaatgttatcctcttctctgtttttgatgaaaacaggagctggtaccttactgagaatatccaaaggttcctgccaaacccagctggggttcagctggaggaccctgagttccaggcttccaacattatgcacagcattaatggctatgtctttgactcactgcagctgtcagtctgcctgcatgaagtggcttattggtacattctgagcataggggcccagactgactttttaagtgtgtttttctctggatataccttcaaacacaaaatggtgtatgaggacaccctcacactcttcccattttctggggagactgttttcatgtccatggagaaccctggcctttggattttaggctgtcacaactcagactttaggaataggggcatgactgccctccttaaagtctcatcctgtgacaaaaacactggggactactatgaagacagctatgaggacatatctgcttatctgctgagcaagaacaatgcaattgagcctaggtccttcagccaaaattctaggcaccccagtaccaggcagaaacaattcaatgccaccacaatcccagagaataccacactgcagagtgatcaagaagagattgattatgatgacactatatcagtagaaatgaagaaagaggactttgacatctatgatgaggatgaaaaccagagtcccaggtcatttcagaagaagaccaggcactacttcattgctgctgtagaaaggctctgggactatggaatgtccagcagcccacatgtgctaaggaatagggcacagagtggatctgtgccacagtttaagaaggtggtgttccaggagttcactgatggctccttcacacagcccctgtacagaggggaactgaatgagcatcttggacttctgggcccctacatcagggctgaggtggaggataacatcatggtgaccttcaggaaccaggcctccagaccctactcattctatagttctctgatctcctatgaagaggatcagagacaaggtgctgagcctaggaagaactttgttaagccaaatgaaacaaagacctacttctggaaggttcagcaccacatggcccctacaaaggatgaatttgactgcaaagcatgggcctacttttctgatgtggacttggaaaaagatgtccactcaggacttattggcccacttctggtctgtcacacaaatacactgaaccctgcacatggcaggcaggtgacagtccaggagtttgctttgttctttaccatctttgatgaaacaaagtcctggtattttactgagaacatggaaaggaactgcagggccccatgcaatatccaaatggaggacccaacattcaaggaaaactacaggttccatgcaatcaatggttatattatggacaccttgcctggcttagtcatggcacaggaccagaggattaggtggtacctgctgtctatgggaagtaatgaaaacatacacagcatccatttctctggccatgtgtttacagtcaggaagaaagaggagtataagatggccttatacaacttgtaccctggggtgtttgaaactgtagaaatgctcccctccaaagctggcatttggagggtggaatgtctgataggggagcacctgcatgctgggatgagcaccttattcctggtgtacagcaataagtgtcaaacccccctgggaatggcatctggacacatcagggacttccagatcactgccagtggtcagtatggccagtgggcccctaagctagccaggctccactactctggctcaatcaatgcctggagcactaaggagccattcagctggatcaaagtggacctgttagcccccatgattattcatggaatcaagacccagggtgccaggcagaaattctcctcactatatatcagccagtttatcatcatgtacagtctggatgggaaaaagtggcaaacctataggggcaacagtactggcaccttgatggtgttctttggcaatgtggacagttcaggaatcaaacataacatctttaaccctcctatcattgccagatacatcagactgcaccccacacactactccataaggagtaccctgaggatggaactcatgggctgtgatctcaatagctgtagcatgcctctgggcatggagagcaaagcaatctctgatgcccagattactgctagcagttatttcaccaacatgtttgcaacctggagcccctctaaggcaaggttgcacctccaaggcagaagcaatgcatggaggccccaggtcaacaaccccaaagagtggctccaggttgattttcagaaaaccatgaaggtgacaggggttaccacccagggggtaaagagcctactaaccagcatgtatgtgaaagagttcctgatctcatccagccaggatgggcaccaatggaccctgttctttcaaaatggaaaggttaaggtctttcaaggtaatcaggactcctttacacctgtggtgaactccttggatcccccacttctaaccagatacctgaggattcatcctcagagttgggtccaccagattgcccttaggatggaagtcttgggttgtgaagcccaagacttgtactga

SEQ ID NO: 138 - DNA, 4392 bp, Artificial Sequence
  Description of Artificial Sequence: Synthetic polynucleotide
atgcagatagagctgagcacctgcttcttcttatgcttgctgaggttctgcttctcagccaccaggagatattacctgggggctgtggagctgagctgggactacatgcagtcagaccttggggagttacctgtggatgccaggttcccccctagagtgcccaagagcttccccttcaacacctctgtggtgtacaagaagacactgtttgtagagttcacagaccacctgttcaacattgccaagccaaggcccccttggatgggcctgcttggccctaccatacaggctgaggtgtatgacacagttgtcatcactctcaagaacatggcctcccatcctgtgagcctgcatgcagtgggggtgagctattggaaggcctctgagggggctgagtatgatgatcagacctcccagagggagaaggaggatgacaaggtgttccctggtggcagccacacttatgtgtggcaggtgctgaaggagaatggccccatggcctcagaccctctgtgtctgacctacagctacctgtcccatgtggatcttgtaaaagacctgaactcaggtctgattggggccctgctggtgtgcagggagggcagtctggccaaagagaagacccagaccttgcacaaattcatccttctgtttgctgtgtttgatgaagggaagagctggcactctgagaccaagaacagcctgatgcaggacagggatgcagccagtgccagggcttggcccaagatgcacacagtcaatggctatgtgaacaggagcctccctggcctgattggctgccataggaagtctgtatactggcatgtgattggtatggggaccaccccagaggtgcacagcatcttccttgaagggcacaccttcctggtgaggaatcacaggcaggccagcctggagatttctcccatcacattcctcactgcccagaccctgctgatggatctgggacagttcctgctgttctgccacatcagcagccaccagcatgatggcatggaggcctatgtgaaggtggacagctgtccagaggagccacagctgaggatgaagaacaatgaggaggctgaggattatgatgatgacctgactgattcagagatggatgtagtcaggtttgatgatgacaacagcccctccttcatccagatcaggtcagtggccaagaagcacccaaagacttgggtgcattacatagctgctgaggaggaggattgggactatgcccccttagtgctggctcctgatgacaggagctacaagagccagtatctgaataatggcccccagaggattggaaggaagtataagaaggtcagattcatggcctatactgatgagactttcaagactagggaggccattcagcatgagtctggcatcttgggccccctgctgtatggggaggtgggggacaccctcttgatcatcttcaagaaccaggccagcaggccttacaacatctacccccatggcatcactgatgtgaggccattgtacagcaggaggctgcctaagggggtaaagcatctgaaggatttcccaatcctccctggtgagatcttcaagtacaagtggactgtgacagtggaggatggccccactaagtcagatccaaggtgcctcaccagatactacagcagctttgtgaatatggagagggacttggccagtggcctgattggtccccttctgatctgctacaaggagtcagtagatcagagggggaatcagatcatgtctgataagaggaatgtgatcctgttctcagtgtttgatgagaacaggagctggtacctgactgagaacatccagaggttcctgcctaatccagctggagtccagctggaggatcctgagtttcaggccagcaacatcatgcacagcatcaatggctatgtgtttgacagcttacagctgtcagtgtgcctgcatgaggtggcttactggtacatcctcagcataggagcacagacagactttctgtctgtgttctttagtggctacaccttcaagcacaagatggtgtatgaggacaccctcaccctgttccccttcagtggtgagacagtgttcatgagcatggagaatccagggctctggatactgggttgccacaactctgatttcaggaacaggggcatgactgccctcctgaaggtctccagctgtgacaagaacactggagactattatgaggacagttatgaggacatctcagcatacctgctgagcaagaacaatgccattgagcccagaagcttcagccagaactctaggcaccctagcactaggcagaagcagttcaatgccactaccatcccagagaataccacattacagtctgaccaggaggagatagactatgatgacaccatctctgtggagatgaagaaggaggactttgacatctatgatgaggatgagaaccagagccccagatccttccagaagaagaccaggcactacttcatagctgctgttgagaggctgtgggactatgggatgtccagcagccctcatgtgctgaggaacagagcccagtctggctctgttcctcagttcaagaaggttgtgttccaggagttcactgatgggtccttcacccagcccttgtatagaggtgagctgaatgagcacctgggccttctgggcccctatataagggctgaggtggaggacaacatcatggtgaccttcaggaaccaggccagcaggccttacagcttctacagcagcctgatcagctatgaagaggaccagaggcagggggctgagccaaggaagaactttgtgaagcccaatgaaacaaagacttacttctggaaggtgcagcaccacatggccccaacaaaggatgagtttgactgcaaggcctgggcctacttctctgatgtggaccttgagaaagatgtccactctggcctgattggccccctgctggtgtgccacaccaacacactgaatcctgcccatggcaggcaggtgacagtgcaggagtttgcactgttcttcaccatctttgatgagaccaagagttggtacttcacagagaacatggagaggaactgcagggccccatgcaacatccagatggaggaccctaccttcaaggagaactataggttccatgccatcaatgggtacatcatggacaccctgcctggccttgtgatggcccaggatcagagaattaggtggtacctgctgagcatgggctctaatgagaacatccacagcatccacttctctgggcatgtgttcactgtgaggaagaaggaggagtacaagatggccctgtacaacttgtaccctggggtgtttgagactgtggagatgctgccatctaaggcagggatctggagggtggagtgcctgattggagagcatctccatgcaggcatgtccaccctgttcctggtgtactccaacaagtgccagacccctctggggatggcatctggacacatcagggacttccagatcactgccagtgggcagtatggccagtgggcccccaagctggccaggctgcactacagtggcagcatcaatgcctggagcaccaaagagcccttctcatggataaaggtggacctgctggcccctatgattatccatgggatcaagactcagggtgccaggcagaagttctcctccctgtatattagccagttcatcatcatgtactcacttgatggcaagaagtggcaaacatacagggggaactctactggcaccctgatggtgttctttggcaatgttgactccagtggcattaagcacaatatcttcaatccacctatcatagccagatacatcaggctgcaccccacccactactcaatcaggagcaccctgagaatggagctgatgggctgtgacttgaatagttgcagcatgcctctgggcatggagagcaaggccatctctgatgcccagatcacagccagcagctacttcactaatatgtttgccacctggagccccagcaaggccaggctgcacttgcaggggaggagcaatgcctggaggccacaggtgaacaaccccaaggagtggctgcaggtggatttccagaagaccatgaaggtcactggagttaccacccagggggtgaagagcctcctgaccagcatgtatgtgaaggagttcttgatcagctctagccaggatggtcaccagtggaccctattcttccagaatgggaaggtgaaggtgttccagggcaaccaggacagcttcaccccagtggtgaacagcctggatcctcctctgttaaccagatacctgaggatccatcctcagagctgggtacaccagattgctctgaggatggaggtcctgggctgtgaagcccaggacctgtactga

SEQ ID NO: 139 - DNA, 4392 bp, Artificial Sequence
  Description of Artificial Sequence: Synthetic polynucleotide
atgcagattgagctgagcacctgtttcttcctgtgccttctgaggttctgcttcagtgccaccaggaggtactacctgggggcagtggagctgagctgggactacatgcagtctgacctgggtgagctgcctgtggatgccaggttcccccccagagtgcctaagagcttccccttcaacacctctgtggtgtacaagaagacactgtttgtggagttcacagaccacctgttcaacattgccaagcccaggcctccctggatggggctgctgggccccactatccaggcagaggtgtatgacactgtggtcatcactctgaagaacatggccagtcaccctgtgagcctgcatgcagtgggggtgagctactggaaggcctctgagggggctgagtatgatgaccagacctctcagagggagaaggaggatgacaaggtgttccctgggggcagccacacctatgtgtggcaggtgctgaaggagaatggccccatggccagtgaccccctgtgcctgacctacagctacctgagccatgtggatctggtgaaggacctgaactcaggcctgataggggccctgctggtgtgcagggagggcagcctggccaaggagaagacccagaccttgcacaagttcatcctgctgtttgctgtgtttgatgaggggaagtcctggcactcagagaccaagaacagcctgatgcaggacagggatgctgcctctgccagggcctggcccaagatgcacacagtgaatggctatgtgaacaggtcactgccaggcctgattggctgccacaggaagtcagtgtactggcatgtgattggcatgggcaccacccctgaggtgcacagcatctttctggagggccacaccttcctggtgaggaaccacaggcaggccagcctggagatctctccaatcacattcctcactgcccagaccctgctgatggatctgggccagttcctgctgttctgccacatcagcagccaccagcatgatggcatggaggcctatgtgaaggtggacagctgtccagaggagccacagctgaggatgaagaacaatgaggaggctgaggattatgatgatgacctgactgactctgagatggatgtggtcaggtttgatgatgacaacagcccctccttcatccagatcaggtcagtggccaagaagcaccctaagacctgggtgcactacattgctgctgaggaggaggactgggactatgcccccctggtgctggctcctgatgacaggagctacaagagccagtacctcaataatggcccccagaggattggcaggaagtacaagaaggtgaggttcatggcctacactgatgagactttcaagaccagggaggccatccagcatgagtctggcatcctgggccccctgctgtatggggaggtgggggacaccctgctgatcatcttcaagaatcaggcctccaggccttacaacatctatccccatgggatcactgatgtgaggcctctgtacagcaggaggctgcccaagggtgtgaagcatctgaaggattttcccatcctccctggtgagatcttcaagtacaagtggactgtgactgtggaggatggccccaccaagtcagatcccaggtgcctcaccagatactacagcagctttgtgaacatggagagggacttggccagtggcctgattgggcccctgctgatctgctacaaggagtcagtggatcagaggggcaatcagatcatgtctgataagaggaatgtgatcctgttctcagtgtttgatgagaacaggagctggtacctgactgagaacattcagaggttcctgcccaatccagctggggtgcagctggaggatcctgagttccaggcttccaacatcatgcacagcatcaatggctatgtgtttgacagcctgcagctgtcagtgtgcctgcatgaggtggcctactggtacattctgagcattggggcacagacagacttcctgtctgtgttcttctctggttacaccttcaagcacaagatggtgtatgaggacaccctcactctgtttcccttttctggtgagactgtgttcatgagcatggagaatcctggcctgtggatcctgggctgtcacaacagtgacttcaggaataggggcatgacagccctcctgaaggtctccagctgtgacaagaacactggagactactatgaggacagctatgaggacatctctgcctacctgctgtccaagaataatgccatagagcccaggtccttcagccagaattctaggcacccaagtaccaggcagaagcagttcaatgccaccaccatccctgagaacaccacactgcagtctgaccaggaggagatagactatgatgacaccatctctgtggagatgaagaaggaggactttgacatctatgatgaggatgagaaccagagccccaggagcttccagaagaagaccaggcactacttcattgctgctgtggagaggctgtgggactatggcatgagcagctcacctcatgtgctgaggaacagagcccagtctggctctgttcctcagttcaagaaggtggtgttccaggagttcactgatgggtccttcacccagcccctgtacaggggtgagctgaatgagcacctggggctgctgggcccctacatcagggctgaggtggaggacaacatcatggtgaccttcaggaaccaggccagcaggccctacagcttctacagcagcctgatctcctatgaggaggatcagaggcagggggctgagccaaggaagaactttgtgaagcccaatgagaccaagacctacttctggaaggtgcagcaccacatggcccccaccaaggatgaatttgattgcaaggcctgggcctacttctctgatgtggatctggagaaggatgtgcacagtgggctgattggcccactgctggtgtgccacaccaacaccctgaaccctgcccatggcaggcaggtgacagtgcaggagtttgccctgttcttcaccatctttgatgagaccaagagctggtacttcacagagaacatggagaggaactgcagggccccctgcaacatccagatggaggaccccaccttcaaggagaactacaggttccatgccatcaatggctacatcatggatactctgcctgggctggtcatggcccaggaccagaggatcagatggtacctgctgagcatgggcagcaatgagaacatccacagcatccacttcagtggccatgtgttcactgtgagaaagaaggaggaatacaagatggccctgtacaacctgtaccctggagtgtttgagactgtggagatgctgcccagcaaggcaggtatctggagggtggagtgcctgattggagagcacctccatgcaggcatgtccaccctgttcctggtgtacagcaacaagtgccagacccccctgggcatggcatctggccacatcagggacttccagatcacagcctctggccagtatggccagtgggcccccaagctggccaggctgcactactctggcagcatcaatgcctggagcacaaaggagcccttcagctggatcaaggtggacctgctggcccccatgatcatccatgggatcaagacccagggtgccaggcagaagttcagctccctgtatatcagccagttcatcatcatgtacagtctggatggcaagaagtggcagacctacaggggcaactctactggcaccctgatggtgttctttggcaatgtggactccagtggcattaagcacaacatcttcaatccacccatcattgccagatacatcaggctgcaccccacccactacagcatcaggtccaccctgaggatggagctgatggggtgtgacctgaatagctgtagtatgcccctgggcatggagagcaaggccatctctgatgcccagatcactgccagcagctacttcaccaatatgtttgccacctggagcccctcaaaggccaggctgcatctgcagggcaggagcaatgcctggaggccccaggtgaacaaccccaaggagtggctgcaggtggacttccagaagaccatgaaggtcactggagtgaccacccagggggtgaagagcctcctgaccagcatgtatgtgaaggagttcctgatcagcagcagccaggatgggcaccagtggaccctgttcttccagaatgggaaggtgaaggtgttccagggcaaccaggacagcttcaccccagtggtgaacagcctggaccctcccctgctgaccagatatctgaggatccaccctcagagctgggtgcaccagattgccctgaggatggaggtcctgggctgtgaggcccaggacctctactga

SEQ ID NO: 140 - DNA, 4407 bp, Artificial Sequence
  Description of Artificial Sequence: Synthetic polynucleotide
atgccaagttcagtaagctgggggatccttctgctggctggtctgtgctgcctggtgccagtctctcttgctgccaccaggagatactacctgggggctgtggagctgtcctgggactacatgcagtcagacctgggggagctgccagttgatgccaggttcccccccagagtccccaagtccttccccttcaacacctcagtggtgtacaaaaagaccctgtttgtggagttcacagaccacctgttcaacatagccaagcccaggcccccctggatgggcctgctgggccccaccatccaggcagaggtttatgacacagtggtcatcaccctgaagaacatggcctcccaccctgtgtccctccatgctgtgggggtgagctactggaaggccagtgagggggcagaatatgatgaccagaccagccagagggagaaggaggatgacaaggtgttcccagggggcagccacacctatgtgtggcaggtcctgaaggagaatggccccatggcctctgaccccctctgcctcacctactcctacctgtcccatgtggacctggtgaaggacctcaactctggcctgattggagccctcctggtgtgcagggaggggagcctggccaaggaaaagacccagaccctgcacaagtttatcctgctctttgcagtctttgatgaggggaagtcctggcacagtgagaccaagaactccctgatgcaggacagagatgctgcctcagccagggcctggcccaagatgcacacagtgaatgggtatgtcaacaggagcctgccaggcctgattgggtgccacagaaagtcagtgtactggcatgtcattggcatgggcaccaccccagaggtgcactccatcttcctggagggccacaccttcctggtgaggaaccacagacaggccagcctggagatcagcccaatcaccttcctcacagcccagaccctcctcatggacctgggccagtttctcctgttctgccacatctcctcccaccagcatgatggcatggaggcctatgtgaaggtggacagctgccctgaggagccccagctcaggatgaagaacaatgaggaggcagaggactatgatgatgatctgacagactctgagatggatgtggtgagatttgatgatgacaacagcccctccttcatccagatcaggtctgtggccaagaagcaccctaagacctgggtgcactacattgcagctgaggaggaggactgggactatgcccccctggtcctggcccctgatgataggtcctacaagtcccagtacctgaacaatggcccccagaggatagggagaaagtacaagaaggtgaggttcatggcctacactgatgagaccttcaagactagggaagccatccagcatgagtctgggatcctgggccccctcctctatggggaggtgggggacaccctgctgatcatcttcaagaaccaggccagcaggccctacaacatttacccccatgggatcacagatgtgagacccctgtacagcaggagactgccaaagggggtgaagcacctgaaggacttccccatcctgccaggggagatcttcaagtacaagtggactgtgacagtggaggatgggcccaccaaatctgaccctagatgcctgaccagatactacagcagctttgtgaacatggagagggacctggcctctggactgattggccctctgctgatctgctacaaggagagtgtggaccagaggggaaaccagatcatgtctgacaagaggaatgtgatcctgttctcagtgtttgatgagaacagatcctggtacctcactgagaacatccagaggttcctgcccaacccagcaggggtgcagctggaggacccagagttccaggcctccaacatcatgcactccatcaatggctatgtctttgactccctgcagctgtcagtgtgcctgcatgaggtggcctactggtacatcctctccattggagcccagactgacttcctgtcagtcttcttcagtggctacaccttcaagcacaagatggtctatgaggacactctgaccctgttccccttctctggggagactgtgttcatgtccatggagaaccctggactgtggatcctgggctgccacaacagtgacttcaggaacaggggcatgactgccctgctgaaggtctccagctgtgacaagaacactggggactactatgaggactcctatgaggacatctctgcctacctgctgtccaagaacaatgccattgagcccaggtccttctcccagaacagcagacacccctccaccaggcagaagcagttcaatgcaaccaccatccctgaaaataccaccctgcagagtgaccaggaggagattgactatgatgacaccatctctgtggagatgaagaaggaggactttgacatctatgatgaggatgagaaccagagccctagaagcttccagaagaagaccagacactacttcattgctgcagtggaaagactgtgggactatgggatgagctcctccccccatgtgctgaggaacagggcccagtctggctctgtgccccagttcaagaaggtggtgttccaggagttcactgatggctccttcacccagcccctgtacaggggagagctgaatgagcacctgggcctgctgggcccctacatcagggctgaggtggaggacaatatcatggtgaccttcagaaaccaggcctccagaccttactccttctacagcagcctgatctcctatgaggaggaccagagacagggggctgagcccaggaagaactttgtgaagcccaatgagaccaagacctacttctggaaggtgcagcaccacatggcccccaccaaggatgagtttgactgcaaggcctgggcctacttctctgatgtggacctggagaaggatgtgcactctggcctgattggccccctgctggtgtgccacaccaacaccctgaaccctgcccatggcaggcaggtgactgtgcaggagtttgccctgttcttcaccatctttgatgagaccaagagctggtacttcactgagaacatggagaggaactgcagggccccctgcaacatccagatggaggaccccaccttcaaggagaactacaggttccatgccatcaatggctacatcatggacaccctgcctggcctggtgatggcccaggaccagaggatcaggtggtacctgctgagcatggggagcaatgagaacatccacagcatccacttctctggccatgtgttcacagtgaggaagaaggaggagtacaagatggccctgtacaacctgtaccctggggtgtttgagacagtggagatgctgccctccaaggctggaatctggagggtggagtgcctgattggggagcacctgcatgctggcatgagcaccctgttcctggtgtacagcaacaagtgccagacccccctgggcatggcctctggccacatcagagacttccagatcacagcctcaggccagtatggccagtgggcccccaagctggccaggctgcactactctggcagcatcaatgcctggtccaccaaggagcccttcagctggatcaaggtggacctcctggcccccatgatcatccatggcatcaagacccagggggccaggcagaagttcagctccctgtacatctcccagttcatcatcatgtactccctggatggcaagaagtggcagacctacagaggcaacagcacaggcaccctgatggtgttctttggcaatgtggacagctctgggatcaagcacaacatcttcaacccccccatcattgccaggtacatcagactgcaccccacccactactccatcaggtccaccctgagaatggagctgatgggctgtgacctgaacagctgcagcatgcccctgggcatggagagcaaggccatctctgatgcccagatcacagccagcagctacttcaccaacatgtttgccacctggtcccccagcaaggccaggctgcacctgcagggcaggagcaatgcctggaggccccaggtgaacaaccccaaggagtggctgcaggtggacttccagaagaccatgaaggtgacaggggtgaccacccagggggtgaagtccctgctgaccagcatgtatgtgaaggagttcctgatcagcagctcccaggatggccaccagtggaccctgttcttccagaatggcaaggtgaaggtgttccagggcaaccaggacagcttcacccctgtggtgaactccctggacccccccctgctgaccagatacctgaggatccacccccagtcctgggtgcaccagattgccctgagaatggaggtgctgggctgtgaggcccaggacctgtactga

SEQ ID NO: 141 - DNA, 4380 bp, Artificial Sequence
  Description of Artificial Sequence: Synthetic polynucleotide
atgaaccttctcctgattcttacttttgtagctgctgcagtagcagccaccaggagatactacctgggggctgtggagctgagctgggactacatgcagtctgacctgggggagctgcctgtggatgccaggttcccccccagagtgcccaagagcttccccttcaacacctctgtggtgtacaagaagaccctgtttgtggagttcactgaccacctgttcaacattgccaagcccaggcccccctggatgggcctgctgggccccaccatccaggctgaggtgtatgacactgtggtgatcaccctgaagaacatggccagccaccctgtgagcctgcatgctgtgggggtgagctactggaaggcctctgagggggctgagtatgatgaccagaccagccagagggagaaggaggatgacaaggtgttccctgggggcagccacacctatgtgtggcaggtgctgaaggagaatggccccatggcctctgaccccctgtgcctgacctacagctacctgagccatgtggacctggtgaaggacctgaactctggcctgattggggccctgctggtgtgcagggagggcagcctggccaaggagaagacccagaccctgcacaagttcatcctgctgtttgctgtgtttgatgagggcaagagctggcactctgaaaccaagaacagcctgatgcaggacagggatgctgcctctgccagggcctggcccaagatgcacactgtgaatggctatgtgaacaggagcctgcctggcctgattggctgccacaggaagtctgtgtactggcatgtgattggcatgggcaccacccctgaggtgcacagcatcttcctggagggccacaccttcctggtcaggaaccacaggcaggccagcctggagatcagccccatcaccttcctgactgcccagaccctgctgatggacctgggccagttcctgctgttctgccacatcagcagccaccagcatgatggcatggaggcctatgtgaaggtggacagctgccctgaggagccccagctgaggatgaagaacaatgaggaggctgaggactatgatgatgacctgactgactctgagatggatgtggtgaggtttgatgatgacaacagccccagcttcatccagatcaggtctgtggccaagaagcaccccaagacctgggtgcactacattgctgctgaggaggaggactgggactatgcccccctggtgctggcccctgatgacaggagctacaagagccagtacctgaacaatggcccccagaggattggcaggaagtacaagaaggtcaggttcatggcctacactgatgaaaccttcaagaccagggaggccatccagcatgagtctggcatcctgggccccctgctgtatggggaggtgggggacaccctgctgatcatcttcaagaaccaggccagcaggccctacaacatctacccccatggcatcactgatgtgaggcccctgtacagcaggaggctgcccaagggggtgaagcacctgaaggacttccccatcctgcctggggagatcttcaagtacaagtggactgtgactgtggaggatggccccaccaagtctgaccccaggtgcctgaccagatactacagcagctttgtgaacatggagagggacctggcctctggcctgattggccccctgctgatctgctacaaggagtctgtggaccagaggggcaaccagatcatgtctgacaagaggaatgtgatcctgttctctgtgtttgatgagaacaggagctggtacctgactgagaacatccagaggttcctgcccaaccctgctggggtgcagctggaggaccctgagttccaggccagcaacatcatgcacagcatcaatggctatgtgtttgacagcctgcagctgtctgtgtgcctgcatgaggtggcctactggtacatcctgagcattggggcccagactgacttcctgtctgtgttcttctctggctacaccttcaagcacaagatggtgtatgaggacaccctgaccctgttccccttctctggggagactgtgttcatgagcatggagaaccctggcctgtggattctgggctgccacaactctgacttcaggaacaggggcatgactgccctgctgaaagtctccagctgtgacaagaacactggggactactatgaggacagctatgaggacatctctgcctacctgctgagcaagaacaatgccattgagcccaggagcttcagccagaatagcaggcaccccagcaccaggcagaagcagttcaatgccaccaccatcccagagaataccaccctgcagtctgaccaggaggagattgactatgatgacaccatctctgtggagatgaagaaggaggactttgacatctacgacgaggacgagaaccagagccccaggagcttccagaagaagaccaggcactacttcattgctgctgtggagaggctgtgggactatggcatgagcagcagcccccatgtgctgaggaacagggcccagtctggctctgtgccccagttcaagaaggtggtgttccaggagttcactgatggcagcttcacccagcccctgtacagaggggagctgaatgagcacctgggcctgctgggcccctacatcagggctgaggtggaggacaacatcatggtgaccttcaggaaccaggccagcaggccctacagcttctacagcagcctgatcagctatgaggaggaccagaggcagggggctgagcccaggaagaactttgtgaagcccaatgaaaccaagacctacttctggaaggtgcagcaccacatggcccccaccaaggatgagtttgactgcaaggcctgggcctacttctctgatgtggacctggagaaggatgtgcactctggcctgattggccccctgctggtgtgccacaccaacaccctgaaccctgcccatggcaggcaggtgactgtgcaggagtttgccctgttcttcaccatctttgatgaaaccaagagctggtacttcactgagaacatggagaggaactgcagggccccctgcaacatccagatggaggaccccaccttcaaggagaactacaggttccatgccatcaatggctacatcatggacaccctgcctggcctggtgatggcccaggaccagaggatcaggtggtacctgctgagcatgggcagcaatgagaacatccacagcatccacttctctggccatgtgttcactgtgaggaagaaggaggagtacaagatggccctgtacaacctgtaccctggggtgtttgagactgtggagatgctgcccagcaaggctggcatctggagggtggagtgcctgattggggagcacctgcatgctggcatgagcaccctgttcctggtgtacagcaacaagtgccagacccccctgggcatggcctctggccacatcagggacttccagatcactgcctctggccagtatggccagtgggcccccaagctggccaggctgcactactctggcagcatcaatgcctggagcaccaaggagcccttcagctggatcaaggtggacctgctggcccccatgatcatccatggcatcaagacccagggggccaggcagaagttcagcagcctgtacatcagccagttcatcatcatgtacagcctggatggcaagaagtggcagacctacaggggcaacagcactggcaccctgatggtgttctttggcaatgtggacagctctggcatcaagcacaacatcttcaacccccccatcattgccagatacatcaggctgcaccccacccactacagcatcaggagcaccctgaggatggagctgatgggctgtgacctgaacagctgcagcatgcccctgggcatggagagcaaggccatctctgatgcccagatcactgccagcagctacttcaccaacatgtttgccacctggagccccagcaaggccaggctgcacctgcagggcaggagcaatgcctggaggccccaggtcaacaaccccaaggagtggctgcaggtggacttccagaagaccatgaaggtgactggggtgaccacccagggggtgaagagcctgctgaccagcatgtatgtgaaggagttcctgatcagcagcagccaggatggccaccagtggaccctgttcttccagaatggcaaggtgaaggtgttccagggcaaccaggacagcttcacccctgtggtgaacagcctggacccccccctgctgaccagatacctgaggattcacccccagagctgggtgcaccagattgccctgaggatggaggtgctgggctgtgaggcccaggacctgtactga

SEQ ID NO: 142 - DNA, 4404 bp, Artificial Sequence
  Description of Artificial Sequence: Synthetic polynucleotide
atggatgctatgaaaagaggcctctgctgtgtgctgctcctctgtggagctgtgtttgttagccccagtgccaccaggagatactacctgggggctgtggagctgagctgggactacatgcagtctgacctgggggagctgcctgtggatgccaggttcccccccagagtgcccaagagcttccccttcaacacctctgtggtgtacaagaagaccctgtttgtggagttcactgaccacctgttcaacattgccaagcccaggcccccctggatgggcctgctgggccccaccatccaggctgaggtgtatgacactgtggtgatcaccctgaagaacatggccagccaccctgtgagcctgcatgctgtgggggtgagctactggaaggcctctgagggggctgagtatgatgaccagaccagccagagggagaaggaggatgacaaggtgttccctgggggcagccacacctatgtgtggcaggtgctgaaggagaatggccccatggcctctgaccccctgtgcctgacctacagctacctgagccatgtggacctggtgaaggacctgaactctggcctgattggggccctgctggtgtgcagggagggcagcctggccaaggagaagacccagaccctgcacaagttcatcctgctgtttgctgtgtttgatgagggcaagagctggcactctgaaaccaagaacagcctgatgcaggacagggatgctgcctctgccagggcctggcccaagatgcacactgtgaatggctatgtgaacaggagcctgcctggcctgattggctgccacaggaagtctgtgtactggcatgtgattggcatgggcaccacccctgaggtgcacagcatcttcctggagggccacaccttcctggtcaggaaccacaggcaggccagcctggagatcagccccatcaccttcctgactgcccagaccctgctgatggacctgggccagttcctgctgttctgccacatcagcagccaccagcatgatggcatggaggcctatgtgaaggtggacagctgccctgaggagccccagctgaggatgaagaacaatgaggaggctgaggactatgatgatgacctgactgactctgagatggatgtggtgaggtttgatgatgacaacagccccagcttcatccagatcaggtctgtggccaagaagcaccccaagacctgggtgcactacattgctgctgaggaggaggactgggactatgcccccctggtgctggcccctgatgacaggagctacaagagccagtacctgaacaatggcccccagaggattggcaggaagtacaagaaggtcaggttcatggcctacactgatgaaaccttcaagaccagggaggccatccagcatgagtctggcatcctgggccccctgctgtatggggaggtgggggacaccctgctgatcatcttcaagaaccaggccagcaggccctacaacatctacccccatggcatcactgatgtgaggcccctgtacagcaggaggctgcccaagggggtgaagcacctgaaggacttccccatcctgcctggggagatcttcaagtacaagtggactgtgactgtggaggatggccccaccaagtctgaccccaggtgcctgaccagatactacagcagctttgtgaacatggagagggacctggcctctggcctgattggccccctgctgatctgctacaaggagtctgtggaccagaggggcaaccagatcatgtctgacaagaggaatgtgatcctgttctctgtgtttgatgagaacaggagctggtacctgactgagaacatccagaggttcctgcccaaccctgctggggtgcagctggaggaccctgagttccaggccagcaacatcatgcacagcatcaatggctatgtgtttgacagcctgcagctgtctgtgtgcctgcatgaggtggcctactggtacatcctgagcattggggcccagactgacttcctgtctgtgttcttctctggctacaccttcaagcacaagatggtgtatgaggacaccctgaccctgttccccttctctggggagactgtgttcatgagcatggagaaccctggcctgtggattctgggctgccacaactctgacttcaggaacaggggcatgactgccctgctgaaagtctccagctgtgacaagaacactggggactactatgaggacagctatgaggacatctctgcctacctgctgagcaagaacaatgccattgagcccaggagcttcagccagaatagcaggcaccccagcaccaggcagaagcagttcaatgccaccaccatcccagagaataccaccctgcagtctgaccaggaggagattgactatgatgacaccatctctgtggagatgaagaaggaggactttgacatctacgacgaggacgagaaccagagccccaggagcttccagaagaagaccaggcactacttcattgctgctgtggagaggctgtgggactatggcatgagcagcagcccccatgtgctgaggaacagggcccagtctggctctgtgccccagttcaagaaggtggtgttccaggagttcactgatggcagcttcacccagcccctgtacagaggggagctgaatgagcacctgggcctgctgggcccctacatcagggctgaggtggaggacaacatcatggtgaccttcaggaaccaggccagcaggccctacagcttctacagcagcctgatcagctatgaggaggaccagaggcagggggctgagcccaggaagaactttgtgaagcccaatgaaaccaagacctacttctggaaggtgcagcaccacatggcccccaccaaggatgagtttgactgcaaggcctgggcctacttctctgatgtggacctggagaaggatgtgcactctggcctgattggccccctgctggtgtgccacaccaacaccctgaaccctgcccatggcaggcaggtgactgtgcaggagtttgccctgttcttcaccatctttgatgaaaccaagagctggtacttcactgagaacatggagaggaactgcagggccccctgcaacatccagatggaggaccccaccttcaaggagaactacaggttccatgccatcaatggctacatcatggacaccctgcctggcctggtgatggcccaggaccagaggatcaggtggtacctgctgagcatgggcagcaatgagaacatccacagcatccacttctctggccatgtgttcactgtgaggaagaaggaggagtacaagatggccctgtacaacctgtaccctggggtgtttgagactgtggagatgctgcccagcaaggctggcatctggagggtggagtgcctgattggggagcacctgcatgctggcatgagcaccctgttcctggtgtacagcaacaagtgccagacccccctgggcatggcctctggccacatcagggacttccagatcactgcctctggccagtatggccagtgggcccccaagctggccaggctgcactactctggcagcatcaatgcctggagcaccaaggagcccttcagctggatcaaggtggacctgctggcccccatgatcatccatggcatcaagacccagggggccaggcagaagttcagcagcctgtacatcagccagttcatcatcatgtacagcctggatggcaagaagtggcagacctacaggggcaacagcactggcaccctgatggtgttctttggcaatgtggacagctctggcatcaagcacaacatcttcaacccccccatcattgccagatacatcaggctgcaccccacccactacagcatcaggagcaccctgaggatggagctgatgggctgtgacctgaacagctgcagcatgcccctgggcatggagagcaaggccatctctgatgcccagatcactgccagcagctacttcaccaacatgtttgccacctggagccccagcaaggccaggctgcacctgcagggcaggagcaatgcctggaggccccaggtcaacaaccccaaggagtggctgcaggtggacttccagaagaccatgaaggtgactggggtgaccacccagggggtgaagagcctgctgaccagcatgtatgtgaaggagttcctgatcagcagcagccaggatggccaccagtggaccctgttcttccagaatggcaaggtgaaggtgttccagggcaaccaggacagcttcacccctgtggtgaacagcctggacccccccctgctgaccagatacctgaggattcacccccagagctgggtgcaccagattgccctgaggatggaggtgctgggctgtgaggcccaggacctgtactga

SEQ ID NO: 143 - DNA, 4401 bp, Artificial Sequence
  Description of Artificial Sequence: Synthetic polynucleotide
atgtggtggaggctgtggtggttactactgcttctgctcctgttatggccaatggtctgggctgctgccaccaggagatactacctgggggctgtggagctgagctgggactacatgcagtctgacctgggggagctgcctgtggatgccaggttcccccccagagtgcccaagagcttccccttcaacacctctgtggtgtacaagaagaccctgtttgtggagttcactgaccacctgttcaacattgccaagcccaggcccccctggatgggcctgctgggccccaccatccaggctgaggtgtatgacactgtggtgatcaccctgaagaacatggccagccaccctgtgagcctgcatgctgtgggggtgagctactggaaggcctctgagggggctgagtatgatgaccagaccagccagagggagaaggaggatgacaaggtgttccctgggggcagccacacctatgtgtggcaggtgctgaaggagaatggccccatggcctctgaccccctgtgcctgacctacagctacctgagccatgtggacctggtgaaggacctgaactctggcctgattggggccctgctggtgtgcagggagggcagcctggccaaggagaagacccagaccctgcacaagttcatcctgctgtttgctgtgtttgatgagggcaagagctggcactctgaaaccaagaacagcctgatgcaggacagggatgctgcctctgccagggcctggcccaagatgcacactgtgaatggctatgtgaacaggagcctgcctggcctgattggctgccacaggaagtctgtgtactggcatgtgattggcatgggcaccacccctgaggtgcacagcatcttcctggagggccacaccttcctggtcaggaaccacaggcaggccagcctggagatcagccccatcaccttcctgactgcccagaccctgctgatggacctgggccagttcctgctgttctgccacatcagcagccaccagcatgatggcatggaggcctatgtgaaggtggacagctgccctgaggagccccagctgaggatgaagaacaatgaggaggctgaggactatgatgatgacctgactgactctgagatggatgtggtgaggtttgatgatgacaacagccccagcttcatccagatcaggtctgtggccaagaagcaccccaagacctgggtgcactacattgctgctgaggaggaggactgggactatgcccccctggtgctggcccctgatgacaggagctacaagagccagtacctgaacaatggcccccagaggattggcaggaagtacaagaaggtcaggttcatggcctacactgatgaaaccttcaagaccagggaggccatccagcatgagtctggcatcctgggccccctgctgtatggggaggtgggggacaccctgctgatcatcttcaagaaccaggccagcaggccctacaacatctacccccatggcatcactgatgtgaggcccctgtacagcaggaggctgcccaagggggtgaagcacctgaaggacttccccatcctgcctggggagatcttcaagtacaagtggactgtgactgtggaggatggccccaccaagtctgaccccaggtgcctgaccagatactacagcagctttgtgaacatggagagggacctggcctctggcctgattggccccctgctgatctgctacaaggagtctgtggaccagaggggcaaccagatcatgtctgacaagaggaatgtgatcctgttctctgtgtttgatgagaacaggagctggtacctgactgagaacatccagaggttcctgcccaaccctgctggggtgcagctggaggaccctgagttccaggccagcaacatcatgcacagcatcaatggctatgtgtttgacagcctgcagctgtctgtgtgcctgcatgaggtggcctactggtacatcctgagcattggggcccagactgacttcctgtctgtgttcttctctggctacaccttcaagcacaagatggtgtatgaggacaccctgaccctgttccccttctctggggagactgtgttcatgagcatggagaaccctggcctgtggattctgggctgccacaactctgacttcaggaacaggggcatgactgccctgctgaaagtctccagctgtgacaagaacactggggactactatgaggacagctatgaggacatctctgcctacctgctgagcaagaacaatgccattgagcccaggagcttcagccagaatagcaggcaccccagcaccaggcagaagcagttcaatgccaccaccatcccagagaataccaccctgcagtctgaccaggaggagattgactatgatgacaccatctctgtggagatgaagaaggaggactttgacatctacgacgaggacgagaaccagagccccaggagcttccagaagaagaccaggcactacttcattgctgctgtggagaggctgtgggactatggcatgagcagcagcccccatgtgctgaggaacagggcccagtctggctctgtgccccagttcaagaaggtggtgttccaggagttcactgatggcagcttcacccagcccctgtacagaggggagctgaatgagcacctgggcctgctgggcccctacatcagggctgaggtggaggacaacatcatggtgaccttcaggaaccaggccagcaggccctacagcttctacagcagcctgatcagctatgaggaggaccagaggcagggggctgagcccaggaagaactttgtgaagcccaatgaaaccaagacctacttctggaaggtgcagcaccacatggcccccaccaaggatgagtttgactgcaaggcctgggcctacttctctgatgtggacctggagaaggatgtgcactctggcctgattggccccctgctggtgtgccacaccaacaccctgaaccctgcccatggcaggcaggtgactgtgcaggagtttgccctgttcttcaccatctttgatgaaaccaagagctggtacttcactgagaacatggagaggaactgcagggccccctgcaacatccagatggaggaccccaccttcaaggagaactacaggttccatgccatcaatggctacatcatggacaccctgcctggcctggtgatggcccaggaccagaggatcaggtggtacctgctgagcatgggcagcaatgagaacatccacagcatccacttctctggccatgtgttcactgtgaggaagaaggaggagtacaagatggccctgtacaacctgtaccctggggtgtttgagactgtggagatgctgcccagcaaggctggcatctggagggtggagtgcctgattggggagcacctgcatgctggcatgagcaccctgttcctggtgtacagcaacaagtgccagacccccctgggcatggcctctggccacatcagggacttccagatcactgcctctggccagtatggccagtgggcccccaagctggccaggctgcactactctggcagcatcaatgcctggagcaccaaggagcccttcagctggatcaaggtggacctgctggcccccatgatcatccatggcatcaagacccagggggccaggcagaagttcagcagcctgtacatcagccagttcatcatcatgtacagcctggatggcaagaagtggcagacctacaggggcaacagcactggcaccctgatggtgttctttggcaatgtggacagctctggcatcaagcacaacatcttcaacccccccatcattgccagatacatcaggctgcaccccacccactacagcatcaggagcaccctgaggatggagctgatgggctgtgacctgaacagctgcagcatgcccctgggcatggagagcaaggccatctctgatgcccagatcactgccagcagctacttcaccaacatgtttgccacctggagccccagcaaggccaggctgcacctgcagggcaggagcaatgcctggaggccccaggtcaacaaccccaaggagtggctgcaggtggacttccagaagaccatgaaggtgactggggtgaccacccagggggtgaagagcctgctgaccagcatgtatgtgaaggagttcctgatcagcagcagccaggatggccaccagtggaccctgttcttccagaatggcaaggtgaaggtgttccagggcaaccaggacagcttcacccctgtggtgaacagcctggacccccccctgctgaccagatacctgaggattcacccccagagctgggtgcaccagattgccctgaggatggaggtgctgggctgtgaggcccaggacctgtactga

SEQ ID NO: 144 - DNA, 4398 bp, Artificial Sequence
  Description of Artificial Sequence: Synthetic polynucleotide
atgtggtggaggctgtggtggttactactgcttctgctcctgttatggccaatggtctgggctgccaccaggagatactacctgggggctgtggagctgagctgggactacatgcagtctgacctgggggagctgcctgtggatgccaggttcccccccagagtgcccaagagcttccccttcaacacctctgtggtgtacaagaagaccctgtttgtggagttcactgaccacctgttcaacattgccaagcccaggcccccctggatgggcctgctgggccccaccatccaggctgaggtgtatgacactgtggtgatcaccctgaagaacatggccagccaccctgtgagcctgcatgctgtgggggtgagctactggaaggcctctgagggggctgagtatgatgaccagaccagccagagggagaaggaggatgacaaggtgttccctgggggcagccacacctatgtgtggcaggtgctgaaggagaatggccccatggcctctgaccccctgtgcctgacctacagctacctgagccatgtggacctggtgaaggacctgaactctggcctgattggggccctgctggtgtgcagggagggcagcctggccaaggagaagacccagaccctgcacaagttcatcctgctgtttgctgtgtttgatgagggcaagagctggcactctgaaaccaagaacagcctgatgcaggacagggatgctgcctctgccagggcctggcccaagatgcacactgtgaatggctatgtgaacaggagcctgcctggcctgattggctgccacaggaagtctgtgtactggcatgtgattggcatgggcaccacccctgaggtgcacagcatcttcctggagggccacaccttcctggtcaggaaccacaggcaggccagcctggagatcagccccatcaccttcctgactgcccagaccctgctgatggacctgggccagttcctgctgttctgccacatcagcagccaccagcatgatggcatggaggcctatgtgaaggtggacagctgccctgaggagccccagctgaggatgaagaacaatgaggaggctgaggactatgatgatgacctgactgactctgagatggatgtggtgaggtttgatgatgacaacagccccagcttcatccagatcaggtctgtggccaagaagcaccccaagacctgggtgcactacattgctgctgaggaggaggactgggactatgcccccctggtgctggcccctgatgacaggagctacaagagccagtacctgaacaatggcccccagaggattggcaggaagtacaagaaggtcaggttcatggcctacactgatgaaaccttcaagaccagggaggccatccagcatgagtctggcatcctgggccccctgctgtatggggaggtgggggacaccctgctgatcatcttcaagaaccaggccagcaggccctacaacatctacccccatggcatcactgatgtgaggcccctgtacagcaggaggctgcccaagggggtgaagcacctgaaggacttccccatcctgcctggggagatcttcaagtacaagtggactgtgactgtggaggatggccccaccaagtctgaccccaggtgcctgaccagatactacagcagctttgtgaacatggagagggacctggcctctggcctgattggccccctgctgatctgctacaaggagtctgtggaccagaggggcaaccagatcatgtctgacaagaggaatgtgatcctgttctctgtgtttgatgagaacaggagctggtacctgactgagaacatccagaggttcctgcccaaccctgctggggtgcagctggaggaccctgagttccaggccagcaacatcatgcacagcatcaatggctatgtgtttgacagcctgcagctgtctgtgtgcctgcatgaggtggcctactggtacatcctgagcattggggcccagactgacttcctgtctgtgttcttctctggctacaccttcaagcacaagatggtgtatgaggacaccctgaccctgttccccttctctggggagactgtgttcatgagcatggagaaccctggcctgtggattctgggctgccacaactctgacttcaggaacaggggcatgactgccctgctgaaagtctccagctgtgacaagaacactggggactactatgaggacagctatgaggacatctctgcctacctgctgagcaagaacaatgccattgagcccaggagcttcagccagaatagcaggcaccccagcaccaggcagaagcagttcaatgccaccaccatcccagagaataccaccctgcagtctgaccaggaggagattgactatgatgacaccatctctgtggagatgaagaaggaggactttgacatctacgacgaggacgagaaccagagccccaggagcttccagaagaagaccaggcactacttcattgctgctgtggagaggctgtgggactatggcatgagcagcagcccccatgtgctgaggaacagggcccagtctggctctgtgccccagttcaagaaggtggtgttccaggagttcactgatggcagcttcacccagcccctgtacagaggggagctgaatgagcacctgggcctgctgggcccctacatcagggctgaggtggaggacaacatcatggtgaccttcaggaaccaggccagcaggccctacagcttctacagcagcctgatcagctatgaggaggaccagaggcagggggctgagcccaggaagaactttgtgaagcccaatgaaaccaagacctacttctggaaggtgcagcaccacatggcccccaccaaggatgagtttgactgcaaggcctgggcctacttctctgatgtggacctggagaaggatgtgcactctggcctgattggccccctgctggtgtgccacaccaacaccctgaaccctgcccatggcaggcaggtgactgtgcaggagtttgccctgttcttcaccatctttgatgaaaccaagagctggtacttcactgagaacatggagaggaactgcagggccccctgcaacatccagatggaggaccccaccttcaaggagaactacaggttccatgccatcaatggctacatcatggacaccctgcctggcctggtgatggcccaggaccagaggatcaggtggtacctgctgagcatgggcagcaatgagaacatccacagcatccacttctctggccatgtgttcactgtgaggaagaaggaggagtacaagatggccctgtacaacctgtaccctggggtgtttgagactgtggagatgctgcccagcaaggctggcatctggagggtggagtgcctgattggggagcacctgcatgctggcatgagcaccctgttcctggtgtacagcaacaagtgccagacccccctgggcatggcctctggccacatcagggacttccagatcactgcctctggccagtatggccagtgggcccccaagctggccaggctgcactactctggcagcatcaatgcctggagcaccaaggagcccttcagctggatcaaggtggacctgctggcccccatgatcatccatggcatcaagacccagggggccaggcagaagttcagcagcctgtacatcagccagttcatcatcatgtacagcctggatggcaagaagtggcagacctacaggggcaacagcactggcaccctgatggtgttctttggcaatgtggacagctctggcatcaagcacaacatcttcaacccccccatcattgccagatacatcaggctgcaccccacccactacagcatcaggagcaccctgaggatggagctgatgggctgtgacctgaacagctgcagcatgcccctgggcatggagagcaaggccatctctgatgcccagatcactgccagcagctacttcaccaacatgtttgccacctggagccccagcaaggccaggctgcacctgcagggcaggagcaatgcctggaggccccaggtcaacaaccccaaggagtggctgcaggtggacttccagaagaccatgaaggtgactggggtgaccacccagggggtgaagagcctgctgaccagcatgtatgtgaaggagttcctgatcagcagcagccaggatggccaccagtggaccctgttcttccagaatggcaaggtgaaggtgttccagggcaaccaggacagcttcacccctgtggtgaacagcctggacccccccctgctgaccagatacctgaggattcacccccagagctgggtgcaccagattgccctgaggatggaggtgctgggctgtgaggcccaggacctgtactga

SEQ ID NO: 145 - DNA, 4386 bp, Artificial Sequence
  Description of Artificial Sequence: Synthetic polynucleotide
atgatgaggcccattgtcctggtgcttctatttgcaacaagtgccctggctgccaccaggagatactacctgggggctgtggagctgagctgggactacatgcagtctgacctgggggagctgcctgtggatgccaggttcccccccagagtgcccaagagcttccccttcaacacctctgtggtgtacaagaagaccctgtttgtggagttcactgaccacctgttcaacattgccaagcccaggcccccctggatgggcctgctgggccccaccatccaggctgaggtgtatgacactgtggtgatcaccctgaagaacatggccagccaccctgtgagcctgcatgctgtgggggtgagctactggaaggcctctgagggggctgagtatgatgaccagaccagccagagggagaaggaggatgacaaggtgttccctgggggcagccacacctatgtgtggcaggtgctgaaggagaatggccccatggcctctgaccccctgtgcctgacctacagctacctgagccatgtggacctggtgaaggacctgaactctggcctgattggggccctgctggtgtgcagggagggcagcctggccaaggagaagacccagaccctgcacaagttcatcctgctgtttgctgtgtttgatgagggcaagagctggcactctgaaaccaagaacagcctgatgcaggacagggatgctgcctctgccagggcctggcccaagatgcacactgtgaatggctatgtgaacaggagcctgcctggcctgattggctgccacaggaagtctgtgtactggcatgtgattggcatgggcaccacccctgaggtgcacagcatcttcctggagggccacaccttcctggtcaggaaccacaggcaggccagcctggagatcagccccatcaccttcctgactgcccagaccctgctgatggacctgggccagttcctgctgttctgccacatcagcagccaccagcatgatggcatggaggcctatgtgaaggtggacagctgccctgaggagccccagctgaggatgaagaacaatgaggaggctgaggactatgatgatgacctgactgactctgagatggatgtggtgaggtttgatgatgacaacagccccagcttcatccagatcaggtctgtggccaagaagcaccccaagacctgggtgcactacattgctgctgaggaggaggactgggactatgcccccctggtgctggcccctgatgacaggagctacaagagccagtacctgaacaatggcccccagaggattggcaggaagtacaagaaggtcaggttcatggcctacactgatgaaaccttcaagaccagggaggccatccagcatgagtctggcatcctgggccccctgctgtatggggaggtgggggacaccctgctgatcatcttcaagaaccaggccagcaggccctacaacatctacccccatggcatcactgatgtgaggcccctgtacagcaggaggctgcccaagggggtgaagcacctgaaggacttccccatcctgcctggggagatcttcaagtacaagtggactgtgactgtggaggatggccccaccaagtctgaccccaggtgcctgaccagatactacagcagctttgtgaacatggagagggacctggcctctggcctgattggccccctgctgatctgctacaaggagtctgtggaccagaggggcaaccagatcatgtctgacaagaggaatgtgatcctgttctctgtgtttgatgagaacaggagctggtacctgactgagaacatccagaggttcctgcccaaccctgctggggtgcagctggaggaccctgagttccaggccagcaacatcatgcacagcatcaatggctatgtgtttgacagcctgcagctgtctgtgtgcctgcatgaggtggcctactggtacatcctgagcattggggcccagactgacttcctgtctgtgttcttctctggctacaccttcaagcacaagatggtgtatgaggacaccctgaccctgttccccttctctggggagactgtgttcatgagcatggagaaccctggcctgtggattctgggctgccacaactctgacttcaggaacaggggcatgactgccctgctgaaagtctccagctgtgacaagaacactggggactactatgaggacagctatgaggacatctctgcctacctgctgagcaagaacaatgccattgagcccaggagcttcagccagaatagcaggcaccccagcaccaggcagaagcagttcaatgccaccaccatcccagagaataccaccctgcagtctgaccaggaggagattgactatgatgacaccatctctgtggagatgaagaaggaggactttgacatctacgacgaggacgagaaccagagccccaggagcttccagaagaagaccaggcactacttcattgctgctgtggagaggctgtgggactatggcatgagcagcagcccccatgtgctgaggaacagggcccagtctggctctgtgccccagttcaagaaggtggtgttccaggagttcactgatggcagcttcacccagcccctgtacagaggggagctgaatgagcacctgggcctgctgggcccctacatcagggctgaggtggaggacaacatcatggtgaccttcaggaaccaggccagcaggccctacagcttctacagcagcctgatcagctatgaggaggaccagaggcagggggctgagcccaggaagaactttgtgaagcccaatgaaaccaagacctacttctggaaggtgcagcaccacatggcccccaccaaggatgagtttgactgcaaggcctgggcctacttctctgatgtggacctggagaaggatgtgcactctggcctgattggccccctgctggtgtgccacaccaacaccctgaaccctgcccatggcaggcaggtgactgtgcaggagtttgccctgttcttcaccatctttgatgaaaccaagagctggtacttcactgagaacatggagaggaactgcagggccccctgcaacatccagatggaggaccccaccttcaaggagaactacaggttccatgccatcaatggctacatcatggacaccctgcctggcctggtgatggcccaggaccagaggatcaggtggtacctgctgagcatgggcagcaatgagaacatccacagcatccacttctctggccatgtgttcactgtgaggaagaaggaggagtacaagatggccctgtacaacctgtaccctggggtgtttgagactgtggagatgctgcccagcaaggctggcatctggagggtggagtgcctgattggggagcacctgcatgctggcatgagcaccctgttcctggtgtacagcaacaagtgccagacccccctgggcatggcctctggccacatcagggacttccagatcactgcctctggccagtatggccagtgggcccccaagctggccaggctgcactactctggcagcatcaatgcctggagcaccaaggagcccttcagctggatcaaggtggacctgctggcccccatgatcatccatggcatcaagacccagggggccaggcagaagttcagcagcctgtacatcagccagttcatcatcatgtacagcctggatggcaagaagtggcagacctacaggggcaacagcactggcaccctgatggtgttctttggcaatgtggacagctctggcatcaagcacaacatcttcaacccccccatcattgccagatacatcaggctgcaccccacccactacagcatcaggagcaccctgaggatggagctgatgggctgtgacctgaacagctgcagcatgcccctgggcatggagagcaaggccatctctgatgcccagatcactgccagcagctacttcaccaacatgtttgccacctggagccccagcaaggccaggctgcacctgcagggcaggagcaatgcctggaggccccaggtcaacaaccccaaggagtggctgcaggtggacttccagaagaccatgaaggtgactggggtgaccacccagggggtgaagagcctgctgaccagcatgtatgtgaaggagttcctgatcagcagcagccaggatggccaccagtggaccctgttcttccagaatggcaaggtgaaggtgttccagggcaaccaggacagcttcacccctgtggtgaacagcctggacccccccctgctgaccagatacctgaggattcacccccagagctgggtgcaccagattgccctgaggatggaggtgctgggctgtgaggcccaggacctgtactga

SEQ ID NO: 146 - DNA, 4377 bp, Artificial Sequence
  Description of Artificial Sequence: Synthetic polynucleotide
atgcagttgctgtcttgtattgccctgattttggctctagtggccaccaggagatactacctgggggctgtggagctgagctgggactacatgcagtctgacctgggggagctgcctgtggatgccaggttcccccccagagtgcccaagagcttccccttcaacacctctgtggtgtacaagaagaccctgtttgtggagttcactgaccacctgttcaacattgccaagcccaggcccccctggatgggcctgctgggccccaccatccaggctgaggtgtatgacactgtggtgatcaccctgaagaacatggccagccaccctgtgagcctgcatgctgtgggggtgagctactggaaggcctctgagggggctgagtatgatgaccagaccagccagagggagaaggaggatgacaaggtgttccctgggggcagccacacctatgtgtggcaggtgctgaaggagaatggccccatggcctctgaccccctgtgcctgacctacagctacctgagccatgtggacctggtgaaggacctgaactctggcctgattggggccctgctggtgtgcagggagggcagcctggccaaggagaagacccagaccctgcacaagttcatcctgctgtttgctgtgtttgatgagggcaagagctggcactctgaaaccaagaacagcctgatgcaggacagggatgctgcctctgccagggcctggcccaagatgcacactgtgaatggctatgtgaacaggagcctgcctggcctgattggctgccacaggaagtctgtgtactggcatgtgattggcatgggcaccacccctgaggtgcacagcatcttcctggagggccacaccttcctggtcaggaaccacaggcaggccagcctggagatcagccccatcaccttcctgactgcccagaccctgctgatggacctgggccagttcctgctgttctgccacatcagcagccaccagcatgatggcatggaggcctatgtgaaggtggacagctgccctgaggagccccagctgaggatgaagaacaatgaggaggctgaggactatgatgatgacctgactgactctgagatggatgtggtgaggtttgatgatgacaacagccccagcttcatccagatcaggtctgtggccaagaagcaccccaagacctgggtgcactacattgctgctgaggaggaggactgggactatgcccccctggtgctggcccctgatgacaggagctacaagagccagtacctgaacaatggcccccagaggattggcaggaagtacaagaaggtcaggttcatggcctacactgatgaaaccttcaagaccagggaggccatccagcatgagtctggcatcctgggccccctgctgtatggggaggtgggggacaccctgctgatcatcttcaagaaccaggccagcaggccctacaacatctacccccatggcatcactgatgtgaggcccctgtacagcaggaggctgcccaagggggtgaagcacctgaaggacttccccatcctgcctggggagatcttcaagtacaagtggactgtgactgtggaggatggccccaccaagtctgaccccaggtgcctgaccagatactacagcagctttgtgaacatggagagggacctggcctctggcctgattggccccctgctgatctgctacaaggagtctgtggaccagaggggcaaccagatcatgtctgacaagaggaatgtgatcctgttctctgtgtttgatgagaacaggagctggtacctgactgagaacatccagaggttcctgcccaaccctgctggggtgcagctggaggaccctgagttccaggccagcaacatcatgcacagcatcaatggctatgtgtttgacagcctgcagctgtctgtgtgcctgcatgaggtggcctactggtacatcctgagcattggggcccagactgacttcctgtctgtgttcttctctggctacaccttcaagcacaagatggtgtatgaggacaccctgaccctgttccccttctctggggagactgtgttcatgagcatggagaaccctggcctgtggattctgggctgccacaactctgacttcaggaacaggggcatgactgccctgctgaaagtctccagctgtgacaagaacactggggactactatgaggacagctatgaggacatctctgcctacctgctgagcaagaacaatgccattgagcccaggagcttcagccagaatagcaggcaccccagcaccaggcagaagcagttcaatgccaccaccatcccagagaataccaccctgcagtctgaccaggaggagattgactatgatgacaccatctctgtggagatgaagaaggaggactttgacatctacgacgaggacgagaaccagagccccaggagcttccagaagaagaccaggcactacttcattgctgctgtggagaggctgtgggactatggcatgagcagcagcccccatgtgctgaggaacagggcccagtctggctctgtgccccagttcaagaaggtggtgttccaggagttcactgatggcagcttcacccagcccctgtacagaggggagctgaatgagcacctgggcctgctgggcccctacatcagggctgaggtggaggacaacatcatggtgaccttcaggaaccaggccagcaggccctacagcttctacagcagcctgatcagctatgaggaggaccagaggcagggggctgagcccaggaagaactttgtgaagcccaatgaaaccaagacctacttctggaaggtgcagcaccacatggcccccaccaaggatgagtttgactgcaaggcctgggcctacttctctgatgtggacctggagaaggatgtgcactctggcctgattggccccctgctggtgtgccacaccaacaccctgaaccctgcccatggcaggcaggtgactgtgcaggagtttgccctgttcttcaccatctttgatgaaaccaagagctggtacttcactgagaacatggagaggaactgcagggccccctgcaacatccagatggaggaccccaccttcaaggagaactacaggttccatgccatcaatggctacatcatggacaccctgcctggcctggtgatggcccaggaccagaggatcaggtggtacctgctgagcatgggcagcaatgagaacatccacagcatccacttctctggccatgtgttcactgtgaggaagaaggaggagtacaagatggccctgtacaacctgtaccctggggtgtttgagactgtggagatgctgcccagcaaggctggcatctggagggtggagtgcctgattggggagcacctgcatgctggcatgagcaccctgttcctggtgtacagcaacaagtgccagacccccctgggcatggcctctggccacatcagggacttccagatcactgcctctggccagtatggccagtgggcccccaagctggccaggctgcactactctggcagcatcaatgcctggagcaccaaggagcccttcagctggatcaaggtggacctgctggcccccatgatcatccatggcatcaagacccagggggccaggcagaagttcagcagcctgtacatcagccagttcatcatcatgtacagcctggatggcaagaagtggcagacctacaggggcaacagcactggcaccctgatggtgttctttggcaatgtggacagctctggcatcaagcacaacatcttcaacccccccatcattgccagatacatcaggctgcaccccacccactacagcatcaggagcaccctgaggatggagctgatgggctgtgacctgaacagctgcagcatgcccctgggcatggagagcaaggccatctctgatgcccagatcactgccagcagctacttcaccaacatgtttgccacctggagccccagcaaggccaggctgcacctgcagggcaggagcaatgcctggaggccccaggtcaacaaccccaaggagtggctgcaggtggacttccagaagaccatgaaggtgactggggtgaccacccagggggtgaagagcctgctgaccagcatgtatgtgaaggagttcctgatcagcagcagccaggatggccaccagtggaccctgttcttccagaatggcaaggtgaaggtgttccagggcaaccaggacagcttcacccctgtggtgaacagcctggacccccccctgctgaccagatacctgaggattcacccccagagctgggtgcaccagattgccctgaggatggaggtgctgggctgtgaggcccaggacctgtactga

SEQ ID NO: 147 - DNA, 4386 bp, Artificial Sequence
  Description of Artificial Sequence: Synthetic polynucleotide
atgggggtgaaagttctgtttgctctcatctgtattgctgtggctgaagctgccaccaggagatactacctgggggctgtggagctgagctgggactacatgcagtctgacctgggggagctgcctgtggatgccaggttcccccccagagtgcccaagagcttccccttcaacacctctgtggtgtacaagaagaccctgtttgtggagttcactgaccacctgttcaacattgccaagcccaggcccccctggatgggcctgctgggccccaccatccaggctgaggtgtatgacactgtggtgatcaccctgaagaacatggccagccaccctgtgagcctgcatgctgtgggggtgagctactggaaggcctctgagggggctgagtatgatgaccagaccagccagagggagaaggaggatgacaaggtgttccctgggggcagccacacctatgtgtggcaggtgctgaaggagaatggccccatggcctctgaccccctgtgcctgacctacagctacctgagccatgtggacctggtgaaggacctgaactctggcctgattggggccctgctggtgtgcagggagggcagcctggccaaggagaagacccagaccctgcacaagttcatcctgctgtttgctgtgtttgatgagggcaagagctggcactctgaaaccaagaacagcctgatgcaggacagggatgctgcctctgccagggcctggcccaagatgcacactgtgaatggctatgtgaacaggagcctgcctggcctgattggctgccacaggaagtctgtgtactggcatgtgattggcatgggcaccacccctgaggtgcacagcatcttcctggagggccacaccttcctggtcaggaaccacaggcaggccagcctggagatcagccccatcaccttcctgactgcccagaccctgctgatggacctgggccagttcctgctgttctgccacatcagcagccaccagcatgatggcatggaggcctatgtgaaggtggacagctgccctgaggagccccagctgaggatgaagaacaatgaggaggctgaggactatgatgatgacctgactgactctgagatggatgtggtgaggtttgatgatgacaacagccccagcttcatccagatcaggtctgtggccaagaagcaccccaagacctgggtgcactacattgctgctgaggaggaggactgggactatgcccccctggtgctggcccctgatgacaggagctacaagagccagtacctgaacaatggcccccagaggattggcaggaagtacaagaaggtcaggttcatggcctacactgatgaaaccttcaagaccagggaggccatccagcatgagtctggcatcctgggccccctgctgtatggggaggtgggggacaccctgctgatcatcttcaagaaccaggccagcaggccctacaacatctacccccatggcatcactgatgtgaggcccctgtacagcaggaggctgcccaagggggtgaagcacctgaaggacttccccatcctgcctggggagatcttcaagtacaagtggactgtgactgtggaggatggccccaccaagtctgaccccaggtgcctgaccagatactacagcagctttgtgaacatggagagggacctggcctctggcctgattggccccctgctgatctgctacaaggagtctgtggaccagaggggcaaccagatcatgtctgacaagaggaatgtgatcctgttctctgtgtttgatgagaacaggagctggtacctgactgagaacatccagaggttcctgcccaaccctgctggggtgcagctggaggaccctgagttccaggccagcaacatcatgcacagcatcaatggctatgtgtttgacagcctgcagctgtctgtgtgcctgcatgaggtggcctactggtacatcctgagcattggggcccagactgacttcctgtctgtgttcttctctggctacaccttcaagcacaagatggtgtatgaggacaccctgaccctgttccccttctctggggagactgtgttcatgagcatggagaaccctggcctgtggattctgggctgccacaactctgacttcaggaacaggggcatgactgccctgctgaaagtctccagctgtgacaagaacactggggactactatgaggacagctatgaggacatctctgcctacctgctgagcaagaacaatgccattgagcccaggagcttcagccagaatagcaggcaccccagcaccaggcagaagcagttcaatgccaccaccatcccagagaataccaccctgcagtctgaccaggaggagattgactatgatgacaccatctctgtggagatgaagaaggaggactttgacatctacgacgaggacgagaaccagagccccaggagcttccagaagaagaccaggcactacttcattgctgctgtggagaggctgtgggactatggcatgagcagcagcccccatgtgctgaggaacagggcccagtctggctctgtgccccagttcaagaaggtggtgttccaggagttcactgatggcagcttcacccagcccctgtacagaggggagctgaatgagcacctgggcctgctgggcccctacatcagggctgaggtggaggacaacatcatggtgaccttcaggaaccaggccagcaggccctacagcttctacagcagcctgatcagctatgaggaggaccagaggcagggggctgagcccaggaagaactttgtgaagcccaatgaaaccaagacctacttctggaaggtgcagcaccacatggcccccaccaaggatgagtttgactgcaaggcctgggcctacttctctgatgtggacctggagaaggatgtgcactctggcctgattggccccctgctggtgtgccacaccaacaccctgaaccctgcccatggcaggcaggtgactgtgcaggagtttgccctgttcttcaccatctttgatgaaaccaagagctggtacttcactgagaacatggagaggaactgcagggccccctgcaacatccagatggaggaccccaccttcaaggagaactacaggttccatgccatcaatggctacatcatggacaccctgcctggcctggtgatggcccaggaccagaggatcaggtggtacctgctgagcatgggcagcaatgagaacatccacagcatccacttctctggccatgtgttcactgtgaggaagaaggaggagtacaagatggccctgtacaacctgtaccctggggtgtttgagactgtggagatgctgcccagcaaggctggcatctggagggtggagtgcctgattggggagcacctgcatgctggcatgagcaccctgttcctggtgtacagcaacaagtgccagacccccctgggcatggcctctggccacatcagggacttccagatcactgcctctggccagtatggccagtgggcccccaagctggccaggctgcactactctggcagcatcaatgcctggagcaccaaggagcccttcagctggatcaaggtggacctgctggcccccatgatcatccatggcatcaagacccagggggccaggcagaagttcagcagcctgtacatcagccagttcatcatcatgtacagcctggatggcaagaagtggcagacctacaggggcaacagcactggcaccctgatggtgttctttggcaatgtggacagctctggcatcaagcacaacatcttcaacccccccatcattgccagatacatcaggctgcaccccacccactacagcatcaggagcaccctgaggatggagctgatgggctgtgacctgaacagctgcagcatgcccctgggcatggagagcaaggccatctctgatgcccagatcactgccagcagctacttcaccaacatgtttgccacctggagccccagcaaggccaggctgcacctgcagggcaggagcaatgcctggaggccccaggtcaacaaccccaaggagtggctgcaggtggacttccagaagaccatgaaggtgactggggtgaccacccagggggtgaagagcctgctgaccagcatgtatgtgaaggagttcctgatcagcagcagccaggatggccaccagtggaccctgttcttccagaatggcaaggtgaaggtgttccagggcaaccaggacagcttcacccctgtggtgaacagcctggacccccccctgctgaccagatacctgaggattcacccccagagctgggtgcaccagattgccctgaggatggaggtgctgggctgtgaggcccaggacctgtactga

SEQ ID NO: 148 - DNA, 4389 bp, Artificial Sequence
  Description of Artificial Sequence: Synthetic polynucleotide
atggcatttctgtggctgctgtcctgctgggctctgctgggcactacctttggggccaccaggagatactacctgggggctgtggagctgagctgggactacatgcagtctgacctgggggagctgcctgtggatgccaggttcccccccagagtgcccaagagcttccccttcaacacctctgtggtgtacaagaagaccctgtttgtggagttcactgaccacctgttcaacattgccaagcccaggcccccctggatgggcctgctgggccccaccatccaggctgaggtgtatgacactgtggtgatcaccctgaagaacatggccagccaccctgtgagcctgcatgctgtgggggtgagctactggaaggcctctgagggggctgagtatgatgaccagaccagccagagggagaaggaggatgacaaggtgttccctgggggcagccacacctatgtgtggcaggtgctgaaggagaatggccccatggcctctgaccccctgtgcctgacctacagctacctgagccatgtggacctggtgaaggacctgaactctggcctgattggggccctgctggtgtgcagggagggcagcctggccaaggagaagacccagaccctgcacaagttcatcctgctgtttgctgtgtttgatgagggcaagagctggcactctgaaaccaagaacagcctgatgcaggacagggatgctgcctctgccagggcctggcccaagatgcacactgtgaatggctatgtgaacaggagcctgcctggcctgattggctgccacaggaagtctgtgtactggcatgtgattggcatgggcaccacccctgaggtgcacagcatcttcctggagggccacaccttcctggtcaggaaccacaggcaggccagcctggagatcagccccatcaccttcctgactgcccagaccctgctgatggacctgggccagttcctgctgttctgccacatcagcagccaccagcatgatggcatggaggcctatgtgaaggtggacagctgccctgaggagccccagctgaggatgaagaacaatgaggaggctgaggactatgatgatgacctgactgactctgagatggatgtggtgaggtttgatgatgacaacagccccagcttcatccagatcaggtctgtggccaagaagcaccccaagacctgggtgcactacattgctgctgaggaggaggactgggactatgcccccctggtgctggcccctgatgacaggagctacaagagccagtacctgaacaatggcccccagaggattggcaggaagtacaagaaggtcaggttcatggcctacactgatgaaaccttcaagaccagggaggccatccagcatgagtctggcatcctgggccccctgctgtatggggaggtgggggacaccctgctgatcatcttcaagaaccaggccagcaggccctacaacatctacccccatggcatcactgatgtgaggcccctgtacagcaggaggctgcccaagggggtgaagcacctgaaggacttccccatcctgcctggggagatcttcaagtacaagtggactgtgactgtggaggatggccccaccaagtctgaccccaggtgcctgaccagatactacagcagctttgtgaacatggagagggacctggcctctggcctgattggccccctgctgatctgctacaaggagtctgtggaccagaggggcaaccagatcatgtctgacaagaggaatgtgatcctgttctctgtgtttgatgagaacaggagctggtacctgactgagaacatccagaggttcctgcccaaccctgctggggtgcagctggaggaccctgagttccaggccagcaacatcatgcacagcatcaatggctatgtgtttgacagcctgcagctgtctgtgtgcctgcatgaggtggcctactggtacatcctgagcattggggcccagactgacttcctgtctgtgttcttctctggctacaccttcaagcacaagatggtgtatgaggacaccctgaccctgttccccttctctggggagactgtgttcatgagcatggagaaccctggcctgtggattctgggctgccacaactctgacttcaggaacaggggcatgactgccctgctgaaagtctccagctgtgacaagaacactggggactactatgaggacagctatgaggacatctctgcctacctgctgagcaagaacaatgccattgagcccaggagcttcagccagaatagcaggcaccccagcaccaggcagaagcagttcaatgccaccaccatcccagagaataccaccctgcagtctgaccaggaggagattgactatgatgacaccatctctgtggagatgaagaaggaggactttgacatctacgacgaggacgagaaccagagccccaggagcttccagaagaagaccaggcactacttcattgctgctgtggagaggctgtgggactatggcatgagcagcagcccccatgtgctgaggaacagggcccagtctggctctgtgccccagttcaagaaggtggtgttccaggagttcactgatggcagcttcacccagcccctgtacagaggggagctgaatgagcacctgggcctgctgggcccctacatcagggctgaggtggaggacaacatcatggtgaccttcaggaaccaggccagcaggccctacagcttctacagcagcctgatcagctatgaggaggaccagaggcagggggctgagcccaggaagaactttgtgaagcccaatgaaaccaagacctacttctggaaggtgcagcaccacatggcccccaccaaggatgagtttgactgcaaggcctgggcctacttctctgatgtggacctggagaaggatgtgcactctggcctgattggccccctgctggtgtgccacaccaacaccctgaaccctgcccatggcaggcaggtgactgtgcaggagtttgccctgttcttcaccatctttgatgaaaccaagagctggtacttcactgagaacatggagaggaactgcagggccccctgcaacatccagatggaggaccccaccttcaaggagaactacaggttccatgccatcaatggctacatcatggacaccctgcctggcctggtgatggcccaggaccagaggatcaggtggtacctgctgagcatgggcagcaatgagaacatccacagcatccacttctctggccatgtgttcactgtgaggaagaaggaggagtacaagatggccctgtacaacctgtaccctggggtgtttgagactgtggagatgctgcccagcaaggctggcatctggagggtggagtgcctgattggggagcacctgcatgctggcatgagcaccctgttcctggtgtacagcaacaagtgccagacccccctgggcatggcctctggccacatcagggacttccagatcactgcctctggccagtatggccagtgggcccccaagctggccaggctgcactactctggcagcatcaatgcctggagcaccaaggagcccttcagctggatcaaggtggacctgctggcccccatgatcatccatggcatcaagacccagggggccaggcagaagttcagcagcctgtacatcagccagttcatcatcatgtacagcctggatggcaagaagtggcagacctacaggggcaacagcactggcaccctgatggtgttctttggcaatgtggacagctctggcatcaagcacaacatcttcaacccccccatcattgccagatacatcaggctgcaccccacccactacagcatcaggagcaccctgaggatggagctgatgggctgtgacctgaacagctgcagcatgcccctgggcatggagagcaaggccatctctgatgcccagatcactgccagcagctacttcaccaacatgtttgccacctggagccccagcaaggccaggctgcacctgcagggcaggagcaatgcctggaggccccaggtcaacaaccccaaggagtggctgcaggtggacttccagaagaccatgaaggtgactggggtgaccacccagggggtgaagagcctgctgaccagcatgtatgtgaaggagttcctgatcagcagcagccaggatggccaccagtggaccctgttcttccagaatggcaaggtgaaggtgttccagggcaaccaggacagcttcacccctgtggtgaacagcctggacccccccctgctgaccagatacctgaggattcacccccagagctgggtgcaccagattgccctgaggatggaggtgctgggctgtgaggcccaggacctgtactga

SEQ ID NO: 149 - DNA, 4383 bp, Artificial Sequence
  Description of Artificial Sequence: Synthetic polynucleotide
atgaagtgggtcacctttatatccttactcttctcctcagcatactctgccaccaggagatactacctgggggctgtggagctgagctgggactacatgcagtctgacctgggggagctgcctgtggatgccaggttcccccccagagtgcccaagagcttccccttcaacacctctgtggtgtacaagaagaccctgtttgtggagttcactgaccacctgttcaacattgccaagcccaggcccccctggatgggcctgctgggccccaccatccaggctgaggtgtatgacactgtggtgatcaccctgaagaacatggccagccaccctgtgagcctgcatgctgtgggggtgagctactggaaggcctctgagggggctgagtatgatgaccagaccagccagagggagaaggaggatgacaaggtgttccctgggggcagccacacctatgtgtggcaggtgctgaaggagaatggccccatggcctctgaccccctgtgcctgacctacagctacctgagccatgtggacctggtgaaggacctgaactctggcctgattggggccctgctggtgtgcagggagggcagcctggccaaggagaagacccagaccctgcacaagttcatcctgctgtttgctgtgtttgatgagggcaagagctggcactctgaaaccaagaacagcctgatgcaggacagggatgctgcctctgccagggcctggcccaagatgcacactgtgaatggctatgtgaacaggagcctgcctggcctgattggctgccacaggaagtctgtgtactggcatgtgattggcatgggcaccacccctgaggtgcacagcatcttcctggagggccacaccttcctggtcaggaaccacaggcaggccagcctggagatcagccccatcaccttcctgactgcccagaccctgctgatggacctgggccagttcctgctgttctgccacatcagcagccaccagcatgatggcatggaggcctatgtgaaggtggacagctgccctgaggagccccagctgaggatgaagaacaatgaggaggctgaggactatgatgatgacctgactgactctgagatggatgtggtgaggtttgatgatgacaacagccccagcttcatccagatcaggtctgtggccaagaagcaccccaagacctgggtgcactacattgctgctgaggaggaggactgggactatgcccccctggtgctggcccctgatgacaggagctacaagagccagtacctgaacaatggcccccagaggattggcaggaagtacaagaaggtcaggttcatggcctacactgatgaaaccttcaagaccagggaggccatccagcatgagtctggcatcctgggccccctgctgtatggggaggtgggggacaccctgctgatcatcttcaagaaccaggccagcaggccctacaacatctacccccatggcatcactgatgtgaggcccctgtacagcaggaggctgcccaagggggtgaagcacctgaaggacttccccatcctgcctggggagatcttcaagtacaagtggactgtgactgtggaggatggccccaccaagtctgaccccaggtgcctgaccagatactacagcagctttgtgaacatggagagggacctggcctctggcctgattggccccctgctgatctgctacaaggagtctgtggaccagaggggcaaccagatcatgtctgacaagaggaatgtgatcctgttctctgtgtttgatgagaacaggagctggtacctgactgagaacatccagaggttcctgcccaaccctgctggggtgcagctggaggaccctgagttccaggccagcaacatcatgcacagcatcaatggctatgtgtttgacagcctgcagctgtctgtgtgcctgcatgaggtggcctactggtacatcctgagcattggggcccagactgacttcctgtctgtgttcttctctggctacaccttcaagcacaagatggtgtatgaggacaccctgaccctgttccccttctctggggagactgtgttcatgagcatggagaaccctggcctgtggattctgggctgccacaactctgacttcaggaacaggggcatgactgccctgctgaaagtctccagctgtgacaagaacactggggactactatgaggacagctatgaggacatctctgcctacctgctgagcaagaacaatgccattgagcccaggagcttcagccagaatagcaggcaccccagcaccaggcagaagcagttcaatgccaccaccatcccagagaataccaccctgcagtctgaccaggaggagattgactatgatgacaccatctctgtggagatgaagaaggaggactttgacatctacgacgaggacgagaaccagagccccaggagcttccagaagaagaccaggcactacttcattgctgctgtggagaggctgtgggactatggcatgagcagcagcccccatgtgctgaggaacagggcccagtctggctctgtgccccagttcaagaaggtggtgttccaggagttcactgatggcagcttcacccagcccctgtacagaggggagctgaatgagcacctgggcctgctgggcccctacatcagggctgaggtggaggacaacatcatggtgaccttcaggaaccaggccagcaggccctacagcttctacagcagcctgatcagctatgaggaggaccagaggcagggggctgagcccaggaagaactttgtgaagcccaatgaaaccaagacctacttctggaaggtgcagcaccacatggcccccaccaaggatgagtttgactgcaaggcctgggcctacttctctgatgtggacctggagaaggatgtgcactctggcctgattggccccctgctggtgtgccacaccaacaccctgaaccctgcccatggcaggcaggtgactgtgcaggagtttgccctgttcttcaccatctttgatgaaaccaagagctggtacttcactgagaacatggagaggaactgcagggccccctgcaacatccagatggaggaccccaccttcaaggagaactacaggttccatgccatcaatggctacatcatggacaccctgcctggcctggtgatggcccaggaccagaggatcaggtggtacctgctgagcatgggcagcaatgagaacatccacagcatccacttctctggccatgtgttcactgtgaggaagaaggaggagtacaagatggccctgtacaacctgtaccctggggtgtttgagactgtggagatgctgcccagcaaggctggcatctggagggtggagtgcctgattggggagcacctgcatgctggcatgagcaccctgttcctggtgtacagcaacaagtgccagacccccctgggcatggcctctggccacatcagggacttccagatcactgcctctggccagtatggccagtgggcccccaagctggccaggctgcactactctggcagcatcaatgcctggagcaccaaggagcccttcagctggatcaaggtggacctgctggcccccatgatcatccatggcatcaagacccagggggccaggcagaagttcagcagcctgtacatcagccagttcatcatcatgtacagcctggatggcaagaagtggcagacctacaggggcaacagcactggcaccctgatggtgttctttggcaatgtggacagctctggcatcaagcacaacatcttcaacccccccatcattgccagatacatcaggctgcaccccacccactacagcatcaggagcaccctgaggatggagctgatgggctgtgacctgaacagctgcagcatgcccctgggcatggagagcaaggccatctctgatgcccagatcactgccagcagctacttcaccaacatgtttgccacctggagccccagcaaggccaggctgcacctgcagggcaggagcaatgcctggaggccccaggtcaacaaccccaaggagtggctgcaggtggacttccagaagaccatgaaggtgactggggtgaccacccagggggtgaagagcctgctgaccagcatgtatgtgaaggagttcctgatcagcagcagccaggatggccaccagtggaccctgttcttccagaatggcaaggtgaaggtgttccagggcaaccaggacagcttcacccctgtggtgaacagcctggacccccccctgctgaccagatacctgaggattcacccccagagctgggtgcaccagattgccctgaggatggaggtgctgggctgtgaggcccaggacctgtactga

SEQ ID NO: 150 - DNA, 4407 bp, Artificial Sequence
  Description of Artificial Sequence: Synthetic polynucleotide
atgccaagttcagtaagctgggggatccttctgctggctggtctgtgctgcctggtgccagtctctcttgctgccaccaggagatactacctgggggctgtggagctgagctgggactacatgcagtctgacctgggggagctgcctgtggatgccaggttcccccccagagtgcccaagagcttccccttcaacacctctgtggtgtacaagaagaccctgtttgtggagttcactgaccacctgttcaacattgccaagcccaggcccccctggatgggcctgctgggccccaccatccaggctgaggtgtatgacactgtggtgatcaccctgaagaacatggccagccaccctgtgagcctgcatgctgtgggggtgagctactggaaggcctctgagggggctgagtatgatgaccagaccagccagagggagaaggaggatgacaaggtgttccctgggggcagccacacctatgtgtggcaggtgctgaaggagaatggccccatggcctctgaccccctgtgcctgacctacagctacctgagccatgtggacctggtgaaggacctgaactctggcctgattggggccctgctggtgtgcagggagggcagcctggccaaggagaagacccagaccctgcacaagttcatcctgctgtttgctgtgtttgatgagggcaagagctggcactctgaaaccaagaacagcctgatgcaggacagggatgctgcctctgccagggcctggcccaagatgcacactgtgaatggctatgtgaacaggagcctgcctggcctgattggctgccacaggaagtctgtgtactggcatgtgattggcatgggcaccacccctgaggtgcacagcatcttcctggagggccacaccttcctggtcaggaaccacaggcaggccagcctggagatcagccccatcaccttcctgactgcccagaccctgctgatggacctgggccagttcctgctgttctgccacatcagcagccaccagcatgatggcatggaggcctatgtgaaggtggacagctgccctgaggagccccagctgaggatgaagaacaatgaggaggctgaggactatgatgatgacctgactgactctgagatggatgtggtgaggtttgatgatgacaacagccccagcttcatccagatcaggtctgtggccaagaagcaccccaagacctgggtgcactacattgctgctgaggaggaggactgggactatgcccccctggtgctggcccctgatgacaggagctacaagagccagtacctgaacaatggcccccagaggattggcaggaagtacaagaaggtcaggttcatggcctacactgatgaaaccttcaagaccagggaggccatccagcatgagtctggcatcctgggccccctgctgtatggggaggtgggggacaccctgctgatcatcttcaagaaccaggccagcaggccctacaacatctacccccatggcatcactgatgtgaggcccctgtacagcaggaggctgcccaagggggtgaagcacctgaaggacttccccatcctgcctggggagatcttcaagtacaagtggactgtgactgtggaggatggccccaccaagtctgaccccaggtgcctgaccagatactacagcagctttgtgaacatggagagggacctggcctctggcctgattggccccctgctgatctgctacaaggagtctgtggaccagaggggcaaccagatcatgtctgacaagaggaatgtgatcctgttctctgtgtttgatgagaacaggagctggtacctgactgagaacatccagaggttcctgcccaaccctgctggggtgcagctggaggaccctgagttccaggccagcaacatcatgcacagcatcaatggctatgtgtttgacagcctgcagctgtctgtgtgcctgcatgaggtggcctactggtacatcctgagcattggggcccagactgacttcctgtctgtgttcttctctggctacaccttcaagcacaagatggtgtatgaggacaccctgaccctgttccccttctctggggagactgtgttcatgagcatggagaaccctggcctgtggattctgggctgccacaactctgacttcaggaacaggggcatgactgccctgctgaaagtctccagctgtgacaagaacactggggactactatgaggacagctatgaggacatctctgcctacctgctgagcaagaacaatgccattgagcccaggagcttcagccagaatagcaggcaccccagcaccaggcagaagcagttcaatgccaccaccatcccagagaataccaccctgcagtctgaccaggaggagattgactatgatgacaccatctctgtggagatgaagaaggaggactttgacatctacgacgaggacgagaaccagagccccaggagcttccagaagaagaccaggcactacttcattgctgctgtggagaggctgtgggactatggcatgagcagcagcccccatgtgctgaggaacagggcccagtctggctctgtgccccagttcaagaaggtggtgttccaggagttcactgatggcagcttcacccagcccctgtacagaggggagctgaatgagcacctgggcctgctgggcccctacatcagggctgaggtggaggacaacatcatggtgaccttcaggaaccaggccagcaggccctacagcttctacagcagcctgatcagctatgaggaggaccagaggcagggggctgagcccaggaagaactttgtgaagcccaatgaaaccaagacctacttctggaaggtgcagcaccacatggcccccaccaaggatgagtttgactgcaaggcctgggcctacttctctgatgtggacctggagaaggatgtgcactctggcctgattggccccctgctggtgtgccacaccaacaccctgaaccctgcccatggcaggcaggtgactgtgcaggagtttgccctgttcttcaccatctttgatgaaaccaagagctggtacttcactgagaacatggagaggaactgcagggccccctgcaacatccagatggaggaccccaccttcaaggagaactacaggttccatgccatcaatggctacatcatggacaccctgcctggcctggtgatggcccaggaccagaggatcaggtggtacctgctgagcatgggcagcaatgagaacatccacagcatccacttctctggccatgtgttcactgtgaggaagaaggaggagtacaagatggccctgtacaacctgtaccctggggtgtttgagactgtggagatgctgcccagcaaggctggcatctggagggtggagtgcctgattggggagcacctgcatgctggcatgagcaccctgttcctggtgtacagcaacaagtgccagacccccctgggcatggcctctggccacatcagggacttccagatcactgcctctggccagtatggccagtgggcccccaagctggccaggctgcactactctggcagcatcaatgcctggagcaccaaggagcccttcagctggatcaaggtggacctgctggcccccatgatcatccatggcatcaagacccagggggccaggcagaagttcagcagcctgtacatcagccagttcatcatcatgtacagcctggatggcaagaagtggcagacctacaggggcaacagcactggcaccctgatggtgttctttggcaatgtggacagctctggcatcaagcacaacatcttcaacccccccatcattgccagatacatcaggctgcaccccacccactacagcatcaggagcaccctgaggatggagctgatgggctgtgacctgaacagctgcagcatgcccctgggcatggagagcaaggccatctctgatgcccagatcactgccagcagctacttcaccaacatgtttgccacctggagccccagcaaggccaggctgcacctgcagggcaggagcaatgcctggaggccccaggtcaacaaccccaaggagtggctgcaggtggacttccagaagaccatgaaggtgactggggtgaccacccagggggtgaagagcctgctgaccagcatgtatgtgaaggagttcctgatcagcagcagccaggatggccaccagtggaccctgttcttccagaatggcaaggtgaaggtgttccagggcaaccaggacagcttcacccctgtggtgaacagcctggacccccccctgctgaccagatacctgaggattcacccccagagctgggtgcaccagattgccctgaggatggaggtgctgggctgtgaggcccaggacctgtactga

SEQ ID NO: 151 - DNA, 4380 bp, Artificial Sequence
  Description of Artificial Sequence: Synthetic polynucleotide
atgaacctgcttttgatcttgacatttgttgctgctgctgttgcagccaccaggagatactacctgggggctgtggagctgtcctgggactacatgcagtcagacctgggggagctgccagttgatgccaggttcccccccagagtccccaagtccttccccttcaacacctcagtggtgtacaaaaagaccctgtttgtggagttcacagaccacctgttcaacatagccaagcccaggcccccctggatgggcctgctgggccccaccatccaggcagaggtttatgacacagtggtcatcaccctgaagaacatggcctcccaccctgtgtccctccatgctgtgggggtgagctactggaaggccagtgagggggcagaatatgatgaccagaccagccagagggagaaggaggatgacaaggtgttcccagggggcagccacacctatgtgtggcaggtcctgaaggagaatggccccatggcctctgaccccctctgcctcacctactcctacctgtcccatgtggacctggtgaaggacctcaactctggcctgattggagccctcctggtgtgcagggaggggagcctggccaaggaaaagacccagaccctgcacaagtttatcctgctctttgcagtctttgatgaggggaagtcctggcacagtgagaccaagaactccctgatgcaggacagagatgctgcctcagccagggcctggcccaagatgcacacagtgaatgggtatgtcaacaggagcctgccaggcctgattgggtgccacagaaagtcagtgtactggcatgtcattggcatgggcaccaccccagaggtgcactccatcttcctggagggccacaccttcctggtgaggaaccacagacaggccagcctggagatcagcccaatcaccttcctcacagcccagaccctcctcatggacctgggccagtttctcctgttctgccacatctcctcccaccagcatgatggcatggaggcctatgtgaaggtggacagctgccctgaggagccccagctcaggatgaagaacaatgaggaggcagaggactatgatgatgatctgacagactctgagatggatgtggtgagatttgatgatgacaacagcccctccttcatccagatcaggtctgtggccaagaagcaccctaagacctgggtgcactacattgcagctgaggaggaggactgggactatgcccccctggtcctggcccctgatgataggtcctacaagtcccagtacctgaacaatggcccccagaggatagggagaaagtacaagaaggtgaggttcatggcctacactgatgagaccttcaagactagggaagccatccagcatgagtctgggatcctgggccccctcctctatggggaggtgggggacaccctgctgatcatcttcaagaaccaggccagcaggccctacaacatttacccccatgggatcacagatgtgagacccctgtacagcaggagactgccaaagggggtgaagcacctgaaggacttccccatcctgccaggggagatcttcaagtacaagtggactgtgacagtggaggatgggcccaccaaatctgaccctagatgcctgaccagatactacagcagctttgtgaacatggagagggacctggcctctggactgattggccctctgctgatctgctacaaggagagtgtggaccagaggggaaaccagatcatgtctgacaagaggaatgtgatcctgttctcagtgtttgatgagaacagatcctggtacctcactgagaacatccagaggttcctgcccaacccagcaggggtgcagctggaggacccagagttccaggcctccaacatcatgcactccatcaatggctatgtctttgactccctgcagctgtcagtgtgcctgcatgaggtggcctactggtacatcctctccattggagcccagactgacttcctgtcagtcttcttcagtggctacaccttcaagcacaagatggtctatgaggacactctgaccctgttccccttctctggggagactgtgttcatgtccatggagaaccctggactgtggatcctgggctgccacaacagtgacttcaggaacaggggcatgactgccctgctgaaggtctccagctgtgacaagaacactggggactactatgaggactcctatgaggacatctctgcctacctgctgtccaagaacaatgccattgagcccaggtccttctcccagaacagcagacacccctccaccaggcagaagcagttcaatgcaaccaccatccctgaaaataccaccctgcagagtgaccaggaggagattgactatgatgacaccatctctgtggagatgaagaaggaggactttgacatctatgatgaggatgagaaccagagccctagaagcttccagaagaagaccagacactacttcattgctgcagtggaaagactgtgggactatgggatgagctcctccccccatgtgctgaggaacagggcccagtctggctctgtgccccagttcaagaaggtggtgttccaggagttcactgatggctccttcacccagcccctgtacaggggagagctgaatgagcacctgggcctgctgggcccctacatcagggctgaggtggaggacaatatcatggtgaccttcagaaaccaggcctccagaccttactccttctacagcagcctgatctcctatgaggaggaccagagacagggggctgagcccaggaagaactttgtgaagcccaatgagaccaagacctacttctggaaggtgcagcaccacatggcccccaccaaggatgagtttgactgcaaggcctgggcctacttctctgatgtggacctggagaaggatgtgcactctggcctgattggccccctgctggtgtgccacaccaacaccctgaaccctgcccatggcaggcaggtgactgtgcaggagtttgccctgttcttcaccatctttgatgagaccaagagctggtacttcactgagaacatggagaggaactgcagggccccctgcaacatccagatggaggaccccaccttcaaggagaactacaggttccatgccatcaatggctacatcatggacaccctgcctggcctggtgatggcccaggaccagaggatcaggtggtacctgctgagcatggggagcaatgagaacatccacagcatccacttctctggccatgtgttcacagtgaggaagaaggaggagtacaagatggccctgtacaacctgtaccctggggtgtttgagacagtggagatgctgccctccaaggctggaatctggagggtggagtgcctgattggggagcacctgcatgctggcatgagcaccctgttcctggtgtacagcaacaagtgccagacccccctgggcatggcctctggccacatcagagacttccagatcacagcctcaggccagtatggccagtgggcccccaagctggccaggctgcactactctggcagcatcaatgcctggtccaccaaggagcccttcagctggatcaaggtggacctcctggcccccatgatcatccatggcatcaagacccagggggccaggcagaagttcagctccctgtacatctcccagttcatcatcatgtactccctggatggcaagaagtggcagacctacagaggcaacagcacaggcaccctgatggtgttctttggcaatgtggacagctctgggatcaagcacaacatcttcaacccccccatcattgccaggtacatcagactgcaccccacccactactccatcaggtccaccctgagaatggagctgatgggctgtgacctgaacagctgcagcatgcccctgggcatggagagcaaggccatctctgatgcccagatcacagccagcagctacttcaccaacatgtttgccacctggtcccccagcaaggccaggctgcacctgcagggcaggagcaatgcctggaggccccaggtgaacaaccccaaggagtggctgcaggtggacttccagaagaccatgaaggtgacaggggtgaccacccagggggtgaagtccctgctgaccagcatgtatgtgaaggagttcctgatcagcagctcccaggatggccaccagtggaccctgttcttccagaatggcaaggtgaaggtgttccagggcaaccaggacagcttcacccctgtggtgaactccctggacccccccctgctgaccagatacctgaggatccacccccagtcctgggtgcaccagattgccctgagaatggaggtgctgggctgtgaggcccaggacctgtactga

SEQ ID NO: 152 - DNA, 4380 bp, Artificial Sequence
  Description of Artificial Sequence: Synthetic polynucleotide
atgaacctgctgctgatcctgacctttgtggctgctgctgtggcagccaccaggagatactacctgggggctgtggagctgtcctgggactacatgcagtcagacctgggggagctgccagttgatgccaggttcccccccagagtccccaagtccttccccttcaacacctcagtggtgtacaaaaagaccctgtttgtggagttcacagaccacctgttcaacatagccaagcccaggcccccctggatgggcctgctgggccccaccatccaggcagaggtttatgacacagtggtcatcaccctgaagaacatggcctcccaccctgtgtccctccatgctgtgggggtgagctactggaaggccagtgagggggcagaatatgatgaccagaccagccagagggagaaggaggatgacaaggtgttcccagggggcagccacacctatgtgtggcaggtcctgaaggagaatggccccatggcctctgaccccctctgcctcacctactcctacctgtcccatgtggacctggtgaaggacctcaactctggcctgattggagccctcctggtgtgcagggaggggagcctggccaaggaaaagacccagaccctgcacaagtttatcctgctctttgcagtctttgatgaggggaagtcctggcacagtgagaccaagaactccctgatgcaggacagagatgctgcctcagccagggcctggcccaagatgcacacagtgaatgggtatgtcaacaggagcctgccaggcctgattgggtgccacagaaagtcagtgtactggcatgtcattggcatgggcaccaccccagaggtgcactccatcttcctggagggccacaccttcctggtgaggaaccacagacaggccagcctggagatcagcccaatcaccttcctcacagcccagaccctcctcatggacctgggccagtttctcctgttctgccacatctcctcccaccagcatgatggcatggaggcctatgtgaaggtggacagctgccctgaggagccccagctcaggatgaagaacaatgaggaggcagaggactatgatgatgatctgacagactctgagatggatgtggtgagatttgatgatgacaacagcccctccttcatccagatcaggtctgtggccaagaagcaccctaagacctgggtgcactacattgcagctgaggaggaggactgggactatgcccccctggtcctggcccctgatgataggtcctacaagtcccagtacctgaacaatggcccccagaggatagggagaaagtacaagaaggtgaggttcatggcctacactgatgagaccttcaagactagggaagccatccagcatgagtctgggatcctgggccccctcctctatggggaggtgggggacaccctgctgatcatcttcaagaaccaggccagcaggccctacaacatttacccccatgggatcacagatgtgagacccctgtacagcaggagactgccaaagggggtgaagcacctgaaggacttccccatcctgccaggggagatcttcaagtacaagtggactgtgacagtggaggatgggcccaccaaatctgaccctagatgcctgaccagatactacagcagctttgtgaacatggagagggacctggcctctggactgattggccctctgctgatctgctacaaggagagtgtggaccagaggggaaaccagatcatgtctgacaagaggaatgtgatcctgttctcagtgtttgatgagaacagatcctggtacctcactgagaacatccagaggttcctgcccaacccagcaggggtgcagctggaggacccagagttccaggcctccaacatcatgcactccatcaatggctatgtctttgactccctgcagctgtcagtgtgcctgcatgaggtggcctactggtacatcctctccattggagcccagactgacttcctgtcagtcttcttcagtggctacaccttcaagcacaagatggtctatgaggacactctgaccctgttccccttctctggggagactgtgttcatgtccatggagaaccctggactgtggatcctgggctgccacaacagtgacttcaggaacaggggcatgactgccctgctgaaggtctccagctgtgacaagaacactggggactactatgaggactcctatgaggacatctctgcctacctgctgtccaagaacaatgccattgagcccaggtccttctcccagaacagcagacacccctccaccaggcagaagcagttcaatgcaaccaccatccctgaaaataccaccctgcagagtgaccaggaggagattgactatgatgacaccatctctgtggagatgaagaaggaggactttgacatctatgatgaggatgagaaccagagccctagaagcttccagaagaagaccagacactacttcattgctgcagtggaaagactgtgggactatgggatgagctcctccccccatgtgctgaggaacagggcccagtctggctctgtgccccagttcaagaaggtggtgttccaggagttcactgatggctccttcacccagcccctgtacaggggagagctgaatgagcacctgggcctgctgggcccctacatcagggctgaggtggaggacaatatcatggtgaccttcagaaaccaggcctccagaccttactccttctacagcagcctgatctcctatgaggaggaccagagacagggggctgagcccaggaagaactttgtgaagcccaatgagaccaagacctacttctggaaggtgcagcaccacatggcccccaccaaggatgagtttgactgcaaggcctgggcctacttctctgatgtggacctggagaaggatgtgcactctggcctgattggccccctgctggtgtgccacaccaacaccctgaaccctgcccatggcaggcaggtgactgtgcaggagtttgccctgttcttcaccatctttgatgagaccaagagctggtacttcactgagaacatggagaggaactgcagggccccctgcaacatccagatggaggaccccaccttcaaggagaactacaggttccatgccatcaatggctacatcatggacaccctgcctggcctggtgatggcccaggaccagaggatcaggtggtacctgctgagcatggggagcaatgagaacatccacagcatccacttctctggccatgtgttcacagtgaggaagaaggaggagtacaagatggccctgtacaacctgtaccctggggtgtttgagacagtggagatgctgccctccaaggctggaatctggagggtggagtgcctgattggggagcacctgcatgctggcatgagcaccctgttcctggtgtacagcaacaagtgccagacccccctgggcatggcctctggccacatcagagacttccagatcacagcctcaggccagtatggccagtgggcccccaagctggccaggctgcactactctggcagcatcaatgcctggtccaccaaggagcccttcagctggatcaaggtggacctcctggcccccatgatcatccatggcatcaagacccagggggccaggcagaagttcagctccctgtacatctcccagttcatcatcatgtactccctggatggcaagaagtggcagacctacagaggcaacagcacaggcaccctgatggtgttctttggcaatgtggacagctctgggatcaagcacaacatcttcaacccccccatcattgccaggtacatcagactgcaccccacccactactccatcaggtccaccctgagaatggagctgatgggctgtgacctgaacagctgcagcatgcccctgggcatggagagcaaggccatctctgatgcccagatcacagccagcagctacttcaccaacatgtttgccacctggtcccccagcaaggccaggctgcacctgcagggcaggagcaatgcctggaggccccaggtgaacaaccccaaggagtggctgcaggtggacttccagaagaccatgaaggtgacaggggtgaccacccagggggtgaagtccctgctgaccagcatgtatgtgaaggagttcctgatcagcagctcccaggatggccaccagtggaccctgttcttccagaatggcaaggtgaaggtgttccagggcaaccaggacagcttcacccctgtggtgaactccctggacccccccctgctgaccagatacctgaggatccacccccagtcctgggtgcaccagattgccctgagaatggaggtgctgggctgtgaggcccaggacctgtactga

SEQ ID NO: 153 - DNA, 4404 bp, Artificial Sequence
  Description of Artificial Sequence: Synthetic polynucleotide
atggatgctatgaaaagaggtttatgttgtgtgttattattgtgtggtgctgtttttgtttccccctctgccaccaggagatactacctgggggctgtggagctgtcctgggactacatgcagtcagacctgggggagctgccagttgatgccaggttcccccccagagtccccaagtccttccccttcaacacctcagtggtgtacaaaaagaccctgtttgtggagttcacagaccacctgttcaacatagccaagcccaggcccccctggatgggcctgctgggccccaccatccaggcagaggtttatgacacagtggtcatcaccctgaagaacatggcctcccaccctgtgtccctccatgctgtgggggtgagctactggaaggccagtgagggggcagaatatgatgaccagaccagccagagggagaaggaggatgacaaggtgttcccagggggcagccacacctatgtgtggcaggtcctgaaggagaatggccccatggcctctgaccccctctgcctcacctactcctacctgtcccatgtggacctggtgaaggacctcaactctggcctgattggagccctcctggtgtgcagggaggggagcctggccaaggaaaagacccagaccctgcacaagtttatcctgctctttgcagtctttgatgaggggaagtcctggcacagtgagaccaagaactccctgatgcaggacagagatgctgcctcagccagggcctggcccaagatgcacacagtgaatgggtatgtcaacaggagcctgccaggcctgattgggtgccacagaaagtcagtgtactggcatgtcattggcatgggcaccaccccagaggtgcactccatcttcctggagggccacaccttcctggtgaggaaccacagacaggccagcctggagatcagcccaatcaccttcctcacagcccagaccctcctcatggacctgggccagtttctcctgttctgccacatctcctcccaccagcatgatggcatggaggcctatgtgaaggtggacagctgccctgaggagccccagctcaggatgaagaacaatgaggaggcagaggactatgatgatgatctgacagactctgagatggatgtggtgagatttgatgatgacaacagcccctccttcatccagatcaggtctgtggccaagaagcaccctaagacctgggtgcactacattgcagctgaggaggaggactgggactatgcccccctggtcctggcccctgatgataggtcctacaagtcccagtacctgaacaatggcccccagaggatagggagaaagtacaagaaggtgaggttcatggcctacactgatgagaccttcaagactagggaagccatccagcatgagtctgggatcctgggccccctcctctatggggaggtgggggacaccctgctgatcatcttcaagaaccaggccagcaggccctacaacatttacccccatgggatcacagatgtgagacccctgtacagcaggagactgccaaagggggtgaagcacctgaaggacttccccatcctgccaggggagatcttcaagtacaagtggactgtgacagtggaggatgggcccaccaaatctgaccctagatgcctgaccagatactacagcagctttgtgaacatggagagggacctggcctctggactgattggccctctgctgatctgctacaaggagagtgtggaccagaggggaaaccagatcatgtctgacaagaggaatgtgatcctgttctcagtgtttgatgagaacagatcctggtacctcactgagaacatccagaggttcctgcccaacccagcaggggtgcagctggaggacccagagttccaggcctccaacatcatgcactccatcaatggctatgtctttgactccctgcagctgtcagtgtgcctgcatgaggtggcctactggtacatcctctccattggagcccagactgacttcctgtcagtcttcttcagtggctacaccttcaagcacaagatggtctatgaggacactctgaccctgttccccttctctggggagactgtgttcatgtccatggagaaccctggactgtggatcctgggctgccacaacagtgacttcaggaacaggggcatgactgccctgctgaaggtctccagctgtgacaagaacactggggactactatgaggactcctatgaggacatctctgcctacctgctgtccaagaacaatgccattgagcccaggtccttctcccagaacagcagacacccctccaccaggcagaagcagttcaatgcaaccaccatccctgaaaataccaccctgcagagtgaccaggaggagattgactatgatgacaccatctctgtggagatgaagaaggaggactttgacatctatgatgaggatgagaaccagagccctagaagcttccagaagaagaccagacactacttcattgctgcagtggaaagactgtgggactatgggatgagctcctccccccatgtgctgaggaacagggcccagtctggctctgtgccccagttcaagaaggtggtgttccaggagttcactgatggctccttcacccagcccctgtacaggggagagctgaatgagcacctgggcctgctgggcccctacatcagggctgaggtggaggacaatatcatggtgaccttcagaaaccaggcctccagaccttactccttctacagcagcctgatctcctatgaggaggaccagagacagggggctgagcccaggaagaactttgtgaagcccaatgagaccaagacctacttctggaaggtgcagcaccacatggcccccaccaaggatgagtttgactgcaaggcctgggcctacttctctgatgtggacctggagaaggatgtgcactctggcctgattggccccctgctggtgtgccacaccaacaccctgaaccctgcccatggcaggcaggtgactgtgcaggagtttgccctgttcttcaccatctttgatgagaccaagagctggtacttcactgagaacatggagaggaactgcagggccccctgcaacatccagatggaggaccccaccttcaaggagaactacaggttccatgccatcaatggctacatcatggacaccctgcctggcctggtgatggcccaggaccagaggatcaggtggtacctgctgagcatggggagcaatgagaacatccacagcatccacttctctggccatgtgttcacagtgaggaagaaggaggagtacaagatggccctgtacaacctgtaccctggggtgtttgagacagtggagatgctgccctccaaggctggaatctggagggtggagtgcctgattggggagcacctgcatgctggcatgagcaccctgttcctggtgtacagcaacaagtgccagacccccctgggcatggcctctggccacatcagagacttccagatcacagcctcaggccagtatggccagtgggcccccaagctggccaggctgcactactctggcagcatcaatgcctggtccaccaaggagcccttcagctggatcaaggtggacctcctggcccccatgatcatccatggcatcaagacccagggggccaggcagaagttcagctccctgtacatctcccagttcatcatcatgtactccctggatggcaagaagtggcagacctacagaggcaacagcacaggcaccctgatggtgttctttggcaatgtggacagctctgggatcaagcacaacatcttcaacccccccatcattgccaggtacatcagactgcaccccacccactactccatcaggtccaccctgagaatggagctgatgggctgtgacctgaacagctgcagcatgcccctgggcatggagagcaaggccatctctgatgcccagatcacagccagcagctacttcaccaacatgtttgccacctggtcccccagcaaggccaggctgcacctgcagggcaggagcaatgcctggaggccccaggtgaacaaccccaaggagtggctgcaggtggacttccagaagaccatgaaggtgacaggggtgaccacccagggggtgaagtccctgctgaccagcatgtatgtgaaggagttcctgatcagcagctcccaggatggccaccagtggaccctgttcttccagaatggcaaggtgaaggtgttccagggcaaccaggacagcttcacccctgtggtgaactccctggacccccccctgctgaccagatacctgaggatccacccccagtcctgggtgcaccagattgccctgagaatggaggtgctgggctgtgaggcccaggacctgtactga

SEQ ID NO: 154 - DNA, 4404 bp, Artificial Sequence
  Description of Artificial Sequence: Synthetic polynucleotide
atggatgccatgaagagaggcctgtgctgtgtgctgctgctgtgtggagctgtgtttgtgagccccagtgccaccaggagatactacctgggggctgtggagctgtcctgggactacatgcagtcagacctgggggagctgccagttgatgccaggttcccccccagagtccccaagtccttccccttcaacacctcagtggtgtacaaaaagaccctgtttgtggagttcacagaccacctgttcaacatagccaagcccaggcccccctggatgggcctgctgggccccaccatccaggcagaggtttatgacacagtggtcatcaccctgaagaacatggcctcccaccctgtgtccctccatgctgtgggggtgagctactggaaggccagtgagggggcagaatatgatgaccagaccagccagagggagaaggaggatgacaaggtgttcccagggggcagccacacctatgtgtggcaggtcctgaaggagaatggccccatggcctctgaccccctctgcctcacctactcctacctgtcccatgtggacctggtgaaggacctcaactctggcctgattggagccctcctggtgtgcagggaggggagcctggccaaggaaaagacccagaccctgcacaagtttatcctgctctttgcagtctttgatgaggggaagtcctggcacagtgagaccaagaactccctgatgcaggacagagatgctgcctcagccagggcctggcccaagatgcacacagtgaatgggtatgtcaacaggagcctgccaggcctgattgggtgccacagaaagtcagtgtactggcatgtcattggcatgggcaccaccccagaggtgcactccatcttcctggagggccacaccttcctggtgaggaaccacagacaggccagcctggagatcagcccaatcaccttcctcacagcccagaccctcctcatggacctgggccagtttctcctgttctgccacatctcctcccaccagcatgatggcatggaggcctatgtgaaggtggacagctgccctgaggagccccagctcaggatgaagaacaatgaggaggcagaggactatgatgatgatctgacagactctgagatggatgtggtgagatttgatgatgacaacagcccctccttcatccagatcaggtctgtggccaagaagcaccctaagacctgggtgcactacattgcagctgaggaggaggactgggactatgcccccctggtcctggcccctgatgataggtcctacaagtcccagtacctgaacaatggcccccagaggatagggagaaagtacaagaaggtgaggttcatggcctacactgatgagaccttcaagactagggaagccatccagcatgagtctgggatcctgggccccctcctctatggggaggtgggggacaccctgctgatcatcttcaagaaccaggccagcaggccctacaacatttacccccatgggatcacagatgtgagacccctgtacagcaggagactgccaaagggggtgaagcacctgaaggacttccccatcctgccaggggagatcttcaagtacaagtggactgtgacagtggaggatgggcccaccaaatctgaccctagatgcctgaccagatactacagcagctttgtgaacatggagagggacctggcctctggactgattggccctctgctgatctgctacaaggagagtgtggaccagaggggaaaccagatcatgtctgacaagaggaatgtgatcctgttctcagtgtttgatgagaacagatcctggtacctcactgagaacatccagaggttcctgcccaacccagcaggggtgcagctggaggacccagagttccaggcctccaacatcatgcactccatcaatggctatgtctttgactccctgcagctgtcagtgtgcctgcatgaggtggcctactggtacatcctctccattggagcccagactgacttcctgtcagtcttcttcagtggctacaccttcaagcacaagatggtctatgaggacactctgaccctgttccccttctctggggagactgtgttcatgtccatggagaaccctggactgtggatcctgggctgccacaacagtgacttcaggaacaggggcatgactgccctgctgaaggtctccagctgtgacaagaacactggggactactatgaggactcctatgaggacatctctgcctacctgctgtccaagaacaatgccattgagcccaggtccttctcccagaacagcagacacccctccaccaggcagaagcagttcaatgcaaccaccatccctgaaaataccaccctgcagagtgaccaggaggagattgactatgatgacaccatctctgtggagatgaagaaggaggactttgacatctatgatgaggatgagaaccagagccctagaagcttccagaagaagaccagacactacttcattgctgcagtggaaagactgtgggactatgggatgagctcctccccccatgtgctgaggaacagggcccagtctggctctgtgccccagttcaagaaggtggtgttccaggagttcactgatggctccttcacccagcccctgtacaggggagagctgaatgagcacctgggcctgctgggcccctacatcagggctgaggtggaggacaatatcatggtgaccttcagaaaccaggcctccagaccttactccttctacagcagcctgatctcctatgaggaggaccagagacagggggctgagcccaggaagaactttgtgaagcccaatgagaccaagacctacttctggaaggtgcagcaccacatggcccccaccaaggatgagtttgactgcaaggcctgggcctacttctctgatgtggacctggagaaggatgtgcactctggcctgattggccccctgctggtgtgccacaccaacaccctgaaccctgcccatggcaggcaggtgactgtgcaggagtttgccctgttcttcaccatctttgatgagaccaagagctggtacttcactgagaacatggagaggaactgcagggccccctgcaacatccagatggaggaccccaccttcaaggagaactacaggttccatgccatcaatggctacatcatggacaccctgcctggcctggtgatggcccaggaccagaggatcaggtggtacctgctgagcatggggagcaatgagaacatccacagcatccacttctctggccatgtgttcacagtgaggaagaaggaggagtacaagatggccctgtacaacctgtaccctggggtgtttgagacagtggagatgctgccctccaaggctggaatctggagggtggagtgcctgattggggagcacctgcatgctggcatgagcaccctgttcctggtgtacagcaacaagtgccagacccccctgggcatggcctctggccacatcagagacttccagatcacagcctcaggccagtatggccagtgggcccccaagctggccaggctgcactactctggcagcatcaatgcctggtccaccaaggagcccttcagctggatcaaggtggacctcctggcccccatgatcatccatggcatcaagacccagggggccaggcagaagttcagctccctgtacatctcccagttcatcatcatgtactccctggatggcaagaagtggcagacctacagaggcaacagcacaggcaccctgatggtgttctttggcaatgtggacagctctgggatcaagcacaacatcttcaacccccccatcattgccaggtacatcagactgcaccccacccactactccatcaggtccaccctgagaatggagctgatgggctgtgacctgaacagctgcagcatgcccctgggcatggagagcaaggccatctctgatgcccagatcacagccagcagctacttcaccaacatgtttgccacctggtcccccagcaaggccaggctgcacctgcagggcaggagcaatgcctggaggccccaggtgaacaaccccaaggagtggctgcaggtggacttccagaagaccatgaaggtgacaggggtgaccacccagggggtgaagtccctgctgaccagcatgtatgtgaaggagttcctgatcagcagctcccaggatggccaccagtggaccctgttcttccagaatggcaaggtgaaggtgttccagggcaaccaggacagcttcacccctgtggtgaactccctggacccccccctgctgaccagatacctgaggatccacccccagtcctgggtgcaccagattgccctgagaatggaggtgctgggctgtgaggcccaggacctgtactga

SEQ ID NO: 155 - DNA, 4398 bp, Artificial Sequence
  Description of Artificial Sequence: Synthetic polynucleotide
atgtggtggagattatggtggttactgttattacttttacttttatggccaatggtgtgggctgccaccaggagatactacctgggggctgtggagctgtcctgggactacatgcagtcagacctgggggagctgccagttgatgccaggttcccccccagagtccccaagtccttccccttcaacacctcagtggtgtacaaaaagaccctgtttgtggagttcacagaccacctgttcaacatagccaagcccaggcccccctggatgggcctgctgggccccaccatccaggcagaggtttatgacacagtggtcatcaccctgaagaacatggcctcccaccctgtgtccctccatgctgtgggggtgagctactggaaggccagtgagggggcagaatatgatgaccagaccagccagagggagaaggaggatgacaaggtgttcccagggggcagccacacctatgtgtggcaggtcctgaaggagaatggccccatggcctctgaccccctctgcctcacctactcctacctgtcccatgtggacctggtgaaggacctcaactctggcctgattggagccctcctggtgtgcagggaggggagcctggccaaggaaaagacccagaccctgcacaagtttatcctgctctttgcagtctttgatgaggggaagtcctggcacagtgagaccaagaactccctgatgcaggacagagatgctgcctcagccagggcctggcccaagatgcacacagtgaatgggtatgtcaacaggagcctgccaggcctgattgggtgccacagaaagtcagtgtactggcatgtcattggcatgggcaccaccccagaggtgcactccatcttcctggagggccacaccttcctggtgaggaaccacagacaggccagcctggagatcagcccaatcaccttcctcacagcccagaccctcctcatggacctgggccagtttctcctgttctgccacatctcctcccaccagcatgatggcatggaggcctatgtgaaggtggacagctgccctgaggagccccagctcaggatgaagaacaatgaggaggcagaggactatgatgatgatctgacagactctgagatggatgtggtgagatttgatgatgacaacagcccctccttcatccagatcaggtctgtggccaagaagcaccctaagacctgggtgcactacattgcagctgaggaggaggactgggactatgcccccctggtcctggcccctgatgataggtcctacaagtcccagtacctgaacaatggcccccagaggatagggagaaagtacaagaaggtgaggttcatggcctacactgatgagaccttcaagactagggaagccatccagcatgagtctgggatcctgggccccctcctctatggggaggtgggggacaccctgctgatcatcttcaagaaccaggccagcaggccctacaacatttacccccatgggatcacagatgtgagacccctgtacagcaggagactgccaaagggggtgaagcacctgaaggacttccccatcctgccaggggagatcttcaagtacaagtggactgtgacagtggaggatgggcccaccaaatctgaccctagatgcctgaccagatactacagcagctttgtgaacatggagagggacctggcctctggactgattggccctctgctgatctgctacaaggagagtgtggaccagaggggaaaccagatcatgtctgacaagaggaatgtgatcctgttctcagtgtttgatgagaacagatcctggtacctcactgagaacatccagaggttcctgcccaacccagcaggggtgcagctggaggacccagagttccaggcctccaacatcatgcactccatcaatggctatgtctttgactccctgcagctgtcagtgtgcctgcatgaggtggcctactggtacatcctctccattggagcccagactgacttcctgtcagtcttcttcagtggctacaccttcaagcacaagatggtctatgaggacactctgaccctgttccccttctctggggagactgtgttcatgtccatggagaaccctggactgtggatcctgggctgccacaacagtgacttcaggaacaggggcatgactgccctgctgaaggtctccagctgtgacaagaacactggggactactatgaggactcctatgaggacatctctgcctacctgctgtccaagaacaatgccattgagcccaggtccttctcccagaacagcagacacccctccaccaggcagaagcagttcaatgcaaccaccatccctgaaaataccaccctgcagagtgaccaggaggagattgactatgatgacaccatctctgtggagatgaagaaggaggactttgacatctatgatgaggatgagaaccagagccctagaagcttccagaagaagaccagacactacttcattgctgcagtggaaagactgtgggactatgggatgagctcctccccccatgtgctgaggaacagggcccagtctggctctgtgccccagttcaagaaggtggtgttccaggagttcactgatggctccttcacccagcccctgtacaggggagagctgaatgagcacctgggcctgctgggcccctacatcagggctgaggtggaggacaatatcatggtgaccttcagaaaccaggcctccagaccttactccttctacagcagcctgatctcctatgaggaggaccagagacagggggctgagcccaggaagaactttgtgaagcccaatgagaccaagacctacttctggaaggtgcagcaccacatggcccccaccaaggatgagtttgactgcaaggcctgggcctacttctctgatgtggacctggagaaggatgtgcactctggcctgattggccccctgctggtgtgccacaccaacaccctgaaccctgcccatggcaggcaggtgactgtgcaggagtttgccctgttcttcaccatctttgatgagaccaagagctggtacttcactgagaacatggagaggaactgcagggccccctgcaacatccagatggaggaccccaccttcaaggagaactacaggttccatgccatcaatggctacatcatggacaccctgcctggcctggtgatggcccaggaccagaggatcaggtggtacctgctgagcatggggagcaatgagaacatccacagcatccacttctctggccatgtgttcacagtgaggaagaaggaggagtacaagatggccctgtacaacctgtaccctggggtgtttgagacagtggagatgctgccctccaaggctggaatctggagggtggagtgcctgattggggagcacctgcatgctggcatgagcaccctgttcctggtgtacagcaacaagtgccagacccccctgggcatggcctctggccacatcagagacttccagatcacagcctcaggccagtatggccagtgggcccccaagctggccaggctgcactactctggcagcatcaatgcctggtccaccaaggagcccttcagctggatcaaggtggacctcctggcccccatgatcatccatggcatcaagacccagggggccaggcagaagttcagctccctgtacatctcccagttcatcatcatgtactccctggatggcaagaagtggcagacctacagaggcaacagcacaggcaccctgatggtgttctttggcaatgtggacagctctgggatcaagcacaacatcttcaacccccccatcattgccaggtacatcagactgcaccccacccactactccatcaggtccaccctgagaatggagctgatgggctgtgacctgaacagctgcagcatgcccctgggcatggagagcaaggccatctctgatgcccagatcacagccagcagctacttcaccaacatgtttgccacctggtcccccagcaaggccaggctgcacctgcagggcaggagcaatgcctggaggccccaggtgaacaaccccaaggagtggctgcaggtggacttccagaagaccatgaaggtgacaggggtgaccacccagggggtgaagtccctgctgaccagcatgtatgtgaaggagttcctgatcagcagctcccaggatggccaccagtggaccctgttcttccagaatggcaaggtgaaggtgttccagggcaaccaggacagcttcacccctgtggtgaactccctggacccccccctgctgaccagatacctgaggatccacccccagtcctgggtgcaccagattgccctgagaatggaggtgctgggctgtgaggcccaggacctgtactga

SEQ ID NO: 156 - DNA, 4398 bp, Artificial Sequence
  Description of Artificial Sequence: Synthetic polynucleotide
atgtggtggaggctgtggtggctgctgctgctgctgctgctgctgtggcccatggtgtgggctgccaccaggagatactacctgggggctgtggagctgtcctgggactacatgcagtcagacctgggggagctgccagttgatgccaggttcccccccagagtccccaagtccttccccttcaacacctcagtggtgtacaaaaagaccctgtttgtggagttcacagaccacctgttcaacatagccaagcccaggcccccctggatgggcctgctgggccccaccatccaggcagaggtttatgacacagtggtcatcaccctgaagaacatggcctcccaccctgtgtccctccatgctgtgggggtgagctactggaaggccagtgagggggcagaatatgatgaccagaccagccagagggagaaggaggatgacaaggtgttcccagggggcagccacacctatgtgtggcaggtcctgaaggagaatggccccatggcctctgaccccctctgcctcacctactcctacctgtcccatgtggacctggtgaaggacctcaactctggcctgattggagccctcctggtgtgcagggaggggagcctggccaaggaaaagacccagaccctgcacaagtttatcctgctctttgcagtctttgatgaggggaagtcctggcacagtgagaccaagaactccctgatgcaggacagagatgctgcctcagccagggcctggcccaagatgcacacagtgaatgggtatgtcaacaggagcctgccaggcctgattgggtgccacagaaagtcagtgtactggcatgtcattggcatgggcaccaccccagaggtgcactccatcttcctggagggccacaccttcctggtgaggaaccacagacaggccagcctggagatcagcccaatcaccttcctcacagcccagaccctcctcatggacctgggccagtttctcctgttctgccacatctcctcccaccagcatgatggcatggaggcctatgtgaaggtggacagctgccctgaggagccccagctcaggatgaagaacaatgaggaggcagaggactatgatgatgatctgacagactctgagatggatgtggtgagatttgatgatgacaacagcccctccttcatccagatcaggtctgtggccaagaagcaccctaagacctgggtgcactacattgcagctgaggaggaggactgggactatgcccccctggtcctggcccctgatgataggtcctacaagtcccagtacctgaacaatggcccccagaggatagggagaaagtacaagaaggtgaggttcatggcctacactgatgagaccttcaagactagggaagccatccagcatgagtctgggatcctgggccccctcctctatggggaggtgggggacaccctgctgatcatcttcaagaaccaggccagcaggccctacaacatttacccccatgggatcacagatgtgagacccctgtacagcaggagactgccaaagggggtgaagcacctgaaggacttccccatcctgccaggggagatcttcaagtacaagtggactgtgacagtggaggatgggcccaccaaatctgaccctagatgcctgaccagatactacagcagctttgtgaacatggagagggacctggcctctggactgattggccctctgctgatctgctacaaggagagtgtggaccagaggggaaaccagatcatgtctgacaagaggaatgtgatcctgttctcagtgtttgatgagaacagatcctggtacctcactgagaacatccagaggttcctgcccaacccagcaggggtgcagctggaggacccagagttccaggcctccaacatcatgcactccatcaatggctatgtctttgactccctgcagctgtcagtgtgcctgcatgaggtggcctactggtacatcctctccattggagcccagactgacttcctgtcagtcttcttcagtggctacaccttcaagcacaagatggtctatgaggacactctgaccctgttccccttctctggggagactgtgttcatgtccatggagaaccctggactgtggatcctgggctgccacaacagtgacttcaggaacaggggcatgactgccctgctgaaggtctccagctgtgacaagaacactggggactactatgaggactcctatgaggacatctctgcctacctgctgtccaagaacaatgccattgagcccaggtccttctcccagaacagcagacacccctccaccaggcagaagcagttcaatgcaaccaccatccctgaaaataccaccctgcagagtgaccaggaggagattgactatgatgacaccatctctgtggagatgaagaaggaggactttgacatctatgatgaggatgagaaccagagccctagaagcttccagaagaagaccagacactacttcattgctgcagtggaaagactgtgggactatgggatgagctcctccccccatgtgctgaggaacagggcccagtctggctctgtgccccagttcaagaaggtggtgttccaggagttcactgatggctccttcacccagcccctgtacaggggagagctgaatgagcacctgggcctgctgggcccctacatcagggctgaggtggaggacaatatcatggtgaccttcagaaaccaggcctccagaccttactccttctacagcagcctgatctcctatgaggaggaccagagacagggggctgagcccaggaagaactttgtgaagcccaatgagaccaagacctacttctggaaggtgcagcaccacatggcccccaccaaggatgagtttgactgcaaggcctgggcctacttctctgatgtggacctggagaaggatgtgcactctggcctgattggccccctgctggtgtgccacaccaacaccctgaaccctgcccatggcaggcaggtgactgtgcaggagtttgccctgttcttcaccatctttgatgagaccaagagctggtacttcactgagaacatggagaggaactgcagggccccctgcaacatccagatggaggaccccaccttcaaggagaactacaggttccatgccatcaatggctacatcatggacaccctgcctggcctggtgatggcccaggaccagaggatcaggtggtacctgctgagcatggggagcaatgagaacatccacagcatccacttctctggccatgtgttcacagtgaggaagaaggaggagtacaagatggccctgtacaacctgtaccctggggtgtttgagacagtggagatgctgccctccaaggctggaatctggagggtggagtgcctgattggggagcacctgcatgctggcatgagcaccctgttcctggtgtacagcaacaagtgccagacccccctgggcatggcctctggccacatcagagacttccagatcacagcctcaggccagtatggccagtgggcccccaagctggccaggctgcactactctggcagcatcaatgcctggtccaccaaggagcccttcagctggatcaaggtggacctcctggcccccatgatcatccatggcatcaagacccagggggccaggcagaagttcagctccctgtacatctcccagttcatcatcatgtactccctggatggcaagaagtggcagacctacagaggcaacagcacaggcaccctgatggtgttctttggcaatgtggacagctctgggatcaagcacaacatcttcaacccccccatcattgccaggtacatcagactgcaccccacccactactccatcaggtccaccctgagaatggagctgatgggctgtgacctgaacagctgcagcatgcccctgggcatggagagcaaggccatctctgatgcccagatcacagccagcagctacttcaccaacatgtttgccacctggtcccccagcaaggccaggctgcacctgcagggcaggagcaatgcctggaggccccaggtgaacaaccccaaggagtggctgcaggtggacttccagaagaccatgaaggtgacaggggtgaccacccagggggtgaagtccctgctgaccagcatgtatgtgaaggagttcctgatcagcagctcccaggatggccaccagtggaccctgttcttccagaatggcaaggtgaaggtgttccagggcaaccaggacagcttcacccctgtggtgaactccctggacccccccctgctgaccagatacctgaggatccacccccagtcctgggtgcaccagattgccctgagaatggaggtgctgggctgtgaggcccaggacctgtactga

SEQ ID NO: 157 - DNA, 4386 bp, Artificial Sequence
  Description of Artificial Sequence: Synthetic polynucleotide
atgatgaggcccattgtcctggtgcttctatttgcaacaagtgccctggctgccaccaggagatactacctgggggctgtggagctgtcctgggactacatgcagtcagacctgggggagctgccagttgatgccaggttcccccccagagtccccaagtccttccccttcaacacctcagtggtgtacaaaaagaccctgtttgtggagttcacagaccacctgttcaacatagccaagcccaggcccccctggatgggcctgctgggccccaccatccaggcagaggtttatgacacagtggtcatcaccctgaagaacatggcctcccaccctgtgtccctccatgctgtgggggtgagctactggaaggccagtgagggggcagaatatgatgaccagaccagccagagggagaaggaggatgacaaggtgttcccagggggcagccacacctatgtgtggcaggtcctgaaggagaatggccccatggcctctgaccccctctgcctcacctactcctacctgtcccatgtggacctggtgaaggacctcaactctggcctgattggagccctcctggtgtgcagggaggggagcctggccaaggaaaagacccagaccctgcacaagtttatcctgctctttgcagtctttgatgaggggaagtcctggcacagtgagaccaagaactccctgatgcaggacagagatgctgcctcagccagggcctggcccaagatgcacacagtgaatgggtatgtcaacaggagcctgccaggcctgattgggtgccacagaaagtcagtgtactggcatgtcattggcatgggcaccaccccagaggtgcactccatcttcctggagggccacaccttcctggtgaggaaccacagacaggccagcctggagatcagcccaatcaccttcctcacagcccagaccctcctcatggacctgggccagtttctcctgttctgccacatctcctcccaccagcatgatggcatggaggcctatgtgaaggtggacagctgccctgaggagccccagctcaggatgaagaacaatgaggaggcagaggactatgatgatgatctgacagactctgagatggatgtggtgagatttgatgatgacaacagcccctccttcatccagatcaggtctgtggccaagaagcaccctaagacctgggtgcactacattgcagctgaggaggaggactgggactatgcccccctggtcctggcccctgatgataggtcctacaagtcccagtacctgaacaatggcccccagaggatagggagaaagtacaagaaggtgaggttcatggcctacactgatgagaccttcaagactagggaagccatccagcatgagtctgggatcctgggccccctcctctatggggaggtgggggacaccctgctgatcatcttcaagaaccaggccagcaggccctacaacatttacccccatgggatcacagatgtgagacccctgtacagcaggagactgccaaagggggtgaagcacctgaaggacttccccatcctgccaggggagatcttcaagtacaagtggactgtgacagtggaggatgggcccaccaaatctgaccctagatgcctgaccagatactacagcagctttgtgaacatggagagggacctggcctctggactgattggccctctgctgatctgctacaaggagagtgtggaccagaggggaaaccagatcatgtctgacaagaggaatgtgatcctgttctcagtgtttgatgagaacagatcctggtacctcactgagaacatccagaggttcctgcccaacccagcaggggtgcagctggaggacccagagttccaggcctccaacatcatgcactccatcaatggctatgtctttgactccctgcagctgtcagtgtgcctgcatgaggtggcctactggtacatcctctccattggagcccagactgacttcctgtcagtcttcttcagtggctacaccttcaagcacaagatggtctatgaggacactctgaccctgttccccttctctggggagactgtgttcatgtccatggagaaccctggactgtggatcctgggctgccacaacagtgacttcaggaacaggggcatgactgccctgctgaaggtctccagctgtgacaagaacactggggactactatgaggactcctatgaggacatctctgcctacctgctgtccaagaacaatgccattgagcccaggtccttctcccagaacagcagacacccctccaccaggcagaagcagttcaatgcaaccaccatccctgaaaataccaccctgcagagtgaccaggaggagattgactatgatgacaccatctctgtggagatgaagaaggaggactttgacatctatgatgaggatgagaaccagagccctagaagcttccagaagaagaccagacactacttcattgctgcagtggaaagactgtgggactatgggatgagctcctccccccatgtgctgaggaacagggcccagtctggctctgtgccccagttcaagaaggtggtgttccaggagttcactgatggctccttcacccagcccctgtacaggggagagctgaatgagcacctgggcctgctgggcccctacatcagggctgaggtggaggacaatatcatggtgaccttcagaaaccaggcctccagaccttactccttctacagcagcctgatctcctatgaggaggaccagagacagggggctgagcccaggaagaactttgtgaagcccaatgagaccaagacctacttctggaaggtgcagcaccacatggcccccaccaaggatgagtttgactgcaaggcctgggcctacttctctgatgtggacctggagaaggatgtgcactctggcctgattggccccctgctggtgtgccacaccaacaccctgaaccctgcccatggcaggcaggtgactgtgcaggagtttgccctgttcttcaccatctttgatgagaccaagagctggtacttcactgagaacatggagaggaactgcagggccccctgcaacatccagatggaggaccccaccttcaaggagaactacaggttccatgccatcaatggctacatcatggacaccctgcctggcctggtgatggcccaggaccagaggatcaggtggtacctgctgagcatggggagcaatgagaacatccacagcatccacttctctggccatgtgttcacagtgaggaagaaggaggagtacaagatggccctgtacaacctgtaccctggggtgtttgagacagtggagatgctgccctccaaggctggaatctggagggtggagtgcctgattggggagcacctgcatgctggcatgagcaccctgttcctggtgtacagcaacaagtgccagacccccctgggcatggcctctggccacatcagagacttccagatcacagcctcaggccagtatggccagtgggcccccaagctggccaggctgcactactctggcagcatcaatgcctggtccaccaaggagcccttcagctggatcaaggtggacctcctggcccccatgatcatccatggcatcaagacccagggggccaggcagaagttcagctccctgtacatctcccagttcatcatcatgtactccctggatggcaagaagtggcagacctacagaggcaacagcacaggcaccctgatggtgttctttggcaatgtggacagctctgggatcaagcacaacatcttcaacccccccatcattgccaggtacatcagactgcaccccacccactactccatcaggtccaccctgagaatggagctgatgggctgtgacctgaacagctgcagcatgcccctgggcatggagagcaaggccatctctgatgcccagatcacagccagcagctacttcaccaacatgtttgccacctggtcccccagcaaggccaggctgcacctgcagggcaggagcaatgcctggaggccccaggtgaacaaccccaaggagtggctgcaggtggacttccagaagaccatgaaggtgacaggggtgaccacccagggggtgaagtccctgctgaccagcatgtatgtgaaggagttcctgatcagcagctcccaggatggccaccagtggaccctgttcttccagaatggcaaggtgaaggtgttccagggcaaccaggacagcttcacccctgtggtgaactccctggacccccccctgctgaccagatacctgaggatccacccccagtcctgggtgcaccagattgccctgagaatggaggtgctgggctgtgaggcccaggacctgtactga

SEQ ID NO: 158 - DNA, 4386 bp, Artificial Sequence
  Description of Artificial Sequence: Synthetic polynucleotide
atgatgagaccaattgttctagtactattatttgccacctctgctcttgctgccaccaggagatactacctgggggctgtggagctgtcctgggactacatgcagtcagacctgggggagctgccagttgatgccaggttcccccccagagtccccaagtccttccccttcaacacctcagtggtgtacaaaaagaccctgtttgtggagttcacagaccacctgttcaacatagccaagcccaggcccccctggatgggcctgctgggccccaccatccaggcagaggtttatgacacagtggtcatcaccctgaagaacatggcctcccaccctgtgtccctccatgctgtgggggtgagctactggaaggccagtgagggggcagaatatgatgaccagaccagccagagggagaaggaggatgacaaggtgttcccagggggcagccacacctatgtgtggcaggtcctgaaggagaatggccccatggcctctgaccccctctgcctcacctactcctacctgtcccatgtggacctggtgaaggacctcaactctggcctgattggagccctcctggtgtgcagggaggggagcctggccaaggaaaagacccagaccctgcacaagtttatcctgctctttgcagtctttgatgaggggaagtcctggcacagtgagaccaagaactccctgatgcaggacagagatgctgcctcagccagggcctggcccaagatgcacacagtgaatgggtatgtcaacaggagcctgccaggcctgattgggtgccacagaaagtcagtgtactggcatgtcattggcatgggcaccaccccagaggtgcactccatcttcctggagggccacaccttcctggtgaggaaccacagacaggccagcctggagatcagcccaatcaccttcctcacagcccagaccctcctcatggacctgggccagtttctcctgttctgccacatctcctcccaccagcatgatggcatggaggcctatgtgaaggtggacagctgccctgaggagccccagctcaggatgaagaacaatgaggaggcagaggactatgatgatgatctgacagactctgagatggatgtggtgagatttgatgatgacaacagcccctccttcatccagatcaggtctgtggccaagaagcaccctaagacctgggtgcactacattgcagctgaggaggaggactgggactatgcccccctggtcctggcccctgatgataggtcctacaagtcccagtacctgaacaatggcccccagaggatagggagaaagtacaagaaggtgaggttcatggcctacactgatgagaccttcaagactagggaagccatccagcatgagtctgggatcctgggccccctcctctatggggaggtgggggacaccctgctgatcatcttcaagaaccaggccagcaggccctacaacatttacccccatgggatcacagatgtgagacccctgtacagcaggagactgccaaagggggtgaagcacctgaaggacttccccatcctgccaggggagatcttcaagtacaagtggactgtgacagtggaggatgggcccaccaaatctgaccctagatgcctgaccagatactacagcagctttgtgaacatggagagggacctggcctctggactgattggccctctgctgatctgctacaaggagagtgtggaccagaggggaaaccagatcatgtctgacaagaggaatgtgatcctgttctcagtgtttgatgagaacagatcctggtacctcactgagaacatccagaggttcctgcccaacccagcaggggtgcagctggaggacccagagttccaggcctccaacatcatgcactccatcaatggctatgtctttgactccctgcagctgtcagtgtgcctgcatgaggtggcctactggtacatcctctccattggagcccagactgacttcctgtcagtcttcttcagtggctacaccttcaagcacaagatggtctatgaggacactctgaccctgttccccttctctggggagactgtgttcatgtccatggagaaccctggactgtggatcctgggctgccacaacagtgacttcaggaacaggggcatgactgccctgctgaaggtctccagctgtgacaagaacactggggactactatgaggactcctatgaggacatctctgcctacctgctgtccaagaacaatgccattgagcccaggtccttctcccagaacagcagacacccctccaccaggcagaagcagttcaatgcaaccaccatccctgaaaataccaccctgcagagtgaccaggaggagattgactatgatgacaccatctctgtggagatgaagaaggaggactttgacatctatgatgaggatgagaaccagagccctagaagcttccagaagaagaccagacactacttcattgctgcagtggaaagactgtgggactatgggatgagctcctccccccatgtgctgaggaacagggcccagtctggctctgtgccccagttcaagaaggtggtgttccaggagttcactgatggctccttcacccagcccctgtacaggggagagctgaatgagcacctgggcctgctgggcccctacatcagggctgaggtggaggacaatatcatggtgaccttcagaaaccaggcctccagaccttactccttctacagcagcctgatctcctatgaggaggaccagagacagggggctgagcccaggaagaactttgtgaagcccaatgagaccaagacctacttctggaaggtgcagcaccacatggcccccaccaaggatgagtttgactgcaaggcctgggcctacttctctgatgtggacctggagaaggatgtgcactctggcctgattggccccctgctggtgtgccacaccaacaccctgaaccctgcccatggcaggcaggtgactgtgcaggagtttgccctgttcttcaccatctttgatgagaccaagagctggtacttcactgagaacatggagaggaactgcagggccccctgcaacatccagatggaggaccccaccttcaaggagaactacaggttccatgccatcaatggctacatcatggacaccctgcctggcctggtgatggcccaggaccagaggatcaggtggtacctgctgagcatggggagcaatgagaacatccacagcatccacttctctggccatgtgttcacagtgaggaagaaggaggagtacaagatggccctgtacaacctgtaccctggggtgtttgagacagtggagatgctgccctccaaggctggaatctggagggtggagtgcctgattggggagcacctgcatgctggcatgagcaccctgttcctggtgtacagcaacaagtgccagacccccctgggcatggcctctggccacatcagagacttccagatcacagcctcaggccagtatggccagtgggcccccaagctggccaggctgcactactctggcagcatcaatgcctggtccaccaaggagcccttcagctggatcaaggtggacctcctggcccccatgatcatccatggcatcaagacccagggggccaggcagaagttcagctccctgtacatctcccagttcatcatcatgtactccctggatggcaagaagtggcagacctacagaggcaacagcacaggcaccctgatggtgttctttggcaatgtggacagctctgggatcaagcacaacatcttcaacccccccatcattgccaggtacatcagactgcaccccacccactactccatcaggtccaccctgagaatggagctgatgggctgtgacctgaacagctgcagcatgcccctgggcatggagagcaaggccatctctgatgcccagatcacagccagcagctacttcaccaacatgtttgccacctggtcccccagcaaggccaggctgcacctgcagggcaggagcaatgcctggaggccccaggtgaacaaccccaaggagtggctgcaggtggacttccagaagaccatgaaggtgacaggggtgaccacccagggggtgaagtccctgctgaccagcatgtatgtgaaggagttcctgatcagcagctcccaggatggccaccagtggaccctgttcttccagaatggcaaggtgaaggtgttccagggcaaccaggacagcttcacccctgtggtgaactccctggacccccccctgctgaccagatacctgaggatccacccccagtcctgggtgcaccagattgccctgagaatggaggtgctgggctgtgaggcccaggacctgtactga

SEQ ID NO: 159 - DNA, 4386 bp, Artificial Sequence
  Description of Artificial Sequence: Synthetic polynucleotide
atgatgaggcccattgtgctggtgctgctgtttgccacctctgccctggctgccaccaggagatactacctgggggctgtggagctgtcctgggactacatgcagtcagacctgggggagctgccagttgatgccaggttcccccccagagtccccaagtccttccccttcaacacctcagtggtgtacaaaaagaccctgtttgtggagttcacagaccacctgttcaacatagccaagcccaggcccccctggatgggcctgctgggccccaccatccaggcagaggtttatgacacagtggtcatcaccctgaagaacatggcctcccaccctgtgtccctccatgctgtgggggtgagctactggaaggccagtgagggggcagaatatgatgaccagaccagccagagggagaaggaggatgacaaggtgttcccagggggcagccacacctatgtgtggcaggtcctgaaggagaatggccccatggcctctgaccccctctgcctcacctactcctacctgtcccatgtggacctggtgaaggacctcaactctggcctgattggagccctcctggtgtgcagggaggggagcctggccaaggaaaagacccagaccctgcacaagtttatcctgctctttgcagtctttgatgaggggaagtcctggcacagtgagaccaagaactccctgatgcaggacagagatgctgcctcagccagggcctggcccaagatgcacacagtgaatgggtatgtcaacaggagcctgccaggcctgattgggtgccacagaaagtcagtgtactggcatgtcattggcatgggcaccaccccagaggtgcactccatcttcctggagggccacaccttcctggtgaggaaccacagacaggccagcctggagatcagcccaatcaccttcctcacagcccagaccctcctcatggacctgggccagtttctcctgttctgccacatctcctcccaccagcatgatggcatggaggcctatgtgaaggtggacagctgccctgaggagccccagctcaggatgaagaacaatgaggaggcagaggactatgatgatgatctgacagactctgagatggatgtggtgagatttgatgatgacaacagcccctccttcatccagatcaggtctgtggccaagaagcaccctaagacctgggtgcactacattgcagctgaggaggaggactgggactatgcccccctggtcctggcccctgatgataggtcctacaagtcccagtacctgaacaatggcccccagaggatagggagaaagtacaagaaggtgaggttcatggcctacactgatgagaccttcaagactagggaagccatccagcatgagtctgggatcctgggccccctcctctatggggaggtgggggacaccctgctgatcatcttcaagaaccaggccagcaggccctacaacatttacccccatgggatcacagatgtgagacccctgtacagcaggagactgccaaagggggtgaagcacctgaaggacttccccatcctgccaggggagatcttcaagtacaagtggactgtgacagtggaggatgggcccaccaaatctgaccctagatgcctgaccagatactacagcagctttgtgaacatggagagggacctggcctctggactgattggccctctgctgatctgctacaaggagagtgtggaccagaggggaaaccagatcatgtctgacaagaggaatgtgatcctgttctcagtgtttgatgagaacagatcctggtacctcactgagaacatccagaggttcctgcccaacccagcaggggtgcagctggaggacccagagttccaggcctccaacatcatgcactccatcaatggctatgtctttgactccctgcagctgtcagtgtgcctgcatgaggtggcctactggtacatcctctccattggagcccagactgacttcctgtcagtcttcttcagtggctacaccttcaagcacaagatggtctatgaggacactctgaccctgttccccttctctggggagactgtgttcatgtccatggagaaccctggactgtggatcctgggctgccacaacagtgacttcaggaacaggggcatgactgccctgctgaaggtctccagctgtgacaagaacactggggactactatgaggactcctatgaggacatctctgcctacctgctgtccaagaacaatgccattgagcccaggtccttctcccagaacagcagacacccctccaccaggcagaagcagttcaatgcaaccaccatccctgaaaataccaccctgcagagtgaccaggaggagattgactatgatgacaccatctctgtggagatgaagaaggaggactttgacatctatgatgaggatgagaaccagagccctagaagcttccagaagaagaccagacactacttcattgctgcagtggaaagactgtgggactatgggatgagctcctccccccatgtgctgaggaacagggcccagtctggctctgtgccccagttcaagaaggtggtgttccaggagttcactgatggctccttcacccagcccctgtacaggggagagctgaatgagcacctgggcctgctgggcccctacatcagggctgaggtggaggacaatatcatggtgaccttcagaaaccaggcctccagaccttactccttctacagcagcctgatctcctatgaggaggaccagagacagggggctgagcccaggaagaactttgtgaagcccaatgagaccaagacctacttctggaaggtgcagcaccacatggcccccaccaaggatgagtttgactgcaaggcctgggcctacttctctgatgtggacctggagaaggatgtgcactctggcctgattggccccctgctggtgtgccacaccaacaccctgaaccctgcccatggcaggcaggtgactgtgcaggagtttgccctgttcttcaccatctttgatgagaccaagagctggtacttcactgagaacatggagaggaactgcagggccccctgcaacatccagatggaggaccccaccttcaaggagaactacaggttccatgccatcaatggctacatcatggacaccctgcctggcctggtgatggcccaggaccagaggatcaggtggtacctgctgagcatggggagcaatgagaacatccacagcatccacttctctggccatgtgttcacagtgaggaagaaggaggagtacaagatggccctgtacaacctgtaccctggggtgtttgagacagtggagatgctgccctccaaggctggaatctggagggtggagtgcctgattggggagcacctgcatgctggcatgagcaccctgttcctggtgtacagcaacaagtgccagacccccctgggcatggcctctggccacatcagagacttccagatcacagcctcaggccagtatggccagtgggcccccaagctggccaggctgcactactctggcagcatcaatgcctggtccaccaaggagcccttcagctggatcaaggtggacctcctggcccccatgatcatccatggcatcaagacccagggggccaggcagaagttcagctccctgtacatctcccagttcatcatcatgtactccctggatggcaagaagtggcagacctacagaggcaacagcacaggcaccctgatggtgttctttggcaatgtggacagctctgggatcaagcacaacatcttcaacccccccatcattgccaggtacatcagactgcaccccacccactactccatcaggtccaccctgagaatggagctgatgggctgtgacctgaacagctgcagcatgcccctgggcatggagagcaaggccatctctgatgcccagatcacagccagcagctacttcaccaacatgtttgccacctggtcccccagcaaggccaggctgcacctgcagggcaggagcaatgcctggaggccccaggtgaacaaccccaaggagtggctgcaggtggacttccagaagaccatgaaggtgacaggggtgaccacccagggggtgaagtccctgctgaccagcatgtatgtgaaggagttcctgatcagcagctcccaggatggccaccagtggaccctgttcttccagaatggcaaggtgaaggtgttccagggcaaccaggacagcttcacccctgtggtgaactccctggacccccccctgctgaccagatacctgaggatccacccccagtcctgggtgcaccagattgccctgagaatggaggtgctgggctgtgaggcccaggacctgtactga

SEQ ID NO: 160 - DNA, 4377 bp, Artificial Sequence
  Description of Artificial Sequence: Synthetic polynucleotide
atgcagttattatcttgtatagcattaatcttagcactagtggccaccaggagatactacctgggggctgtggagctgtcctgggactacatgcagtcagacctgggggagctgccagttgatgccaggttcccccccagagtccccaagtccttccccttcaacacctcagtggtgtacaaaaagaccctgtttgtggagttcacagaccacctgttcaacatagccaagcccaggcccccctggatgggcctgctgggccccaccatccaggcagaggtttatgacacagtggtcatcaccctgaagaacatggcctcccaccctgtgtccctccatgctgtgggggtgagctactggaaggccagtgagggggcagaatatgatgaccagaccagccagagggagaaggaggatgacaaggtgttcccagggggcagccacacctatgtgtggcaggtcctgaaggagaatggccccatggcctctgaccccctctgcctcacctactcctacctgtcccatgtggacctggtgaaggacctcaactctggcctgattggagccctcctggtgtgcagggaggggagcctggccaaggaaaagacccagaccctgcacaagtttatcctgctctttgcagtctttgatgaggggaagtcctggcacagtgagaccaagaactccctgatgcaggacagagatgctgcctcagccagggcctggcccaagatgcacacagtgaatgggtatgtcaacaggagcctgccaggcctgattgggtgccacagaaagtcagtgtactggcatgtcattggcatgggcaccaccccagaggtgcactccatcttcctggagggccacaccttcctggtgaggaaccacagacaggccagcctggagatcagcccaatcaccttcctcacagcccagaccctcctcatggacctgggccagtttctcctgttctgccacatctcctcccaccagcatgatggcatggaggcctatgtgaaggtggacagctgccctgaggagccccagctcaggatgaagaacaatgaggaggcagaggactatgatgatgatctgacagactctgagatggatgtggtgagatttgatgatgacaacagcccctccttcatccagatcaggtctgtggccaagaagcaccctaagacctgggtgcactacattgcagctgaggaggaggactgggactatgcccccctggtcctggcccctgatgataggtcctacaagtcccagtacctgaacaatggcccccagaggatagggagaaagtacaagaaggtgaggttcatggcctacactgatgagaccttcaagactagggaagccatccagcatgagtctgggatcctgggccccctcctctatggggaggtgggggacaccctgctgatcatcttcaagaaccaggccagcaggccctacaacatttacccccatgggatcacagatgtgagacccctgtacagcaggagactgccaaagggggtgaagcacctgaaggacttccccatcctgccaggggagatcttcaagtacaagtggactgtgacagtggaggatgggcccaccaaatctgaccctagatgcctgaccagatactacagcagctttgtgaacatggagagggacctggcctctggactgattggccctctgctgatctgctacaaggagagtgtggaccagaggggaaaccagatcatgtctgacaagaggaatgtgatcctgttctcagtgtttgatgagaacagatcctggtacctcactgagaacatccagaggttcctgcccaacccagcaggggtgcagctggaggacccagagttccaggcctccaacatcatgcactccatcaatggctatgtctttgactccctgcagctgtcagtgtgcctgcatgaggtggcctactggtacatcctctccattggagcccagactgacttcctgtcagtcttcttcagtggctacaccttcaagcacaagatggtctatgaggacactctgaccctgttccccttctctggggagactgtgttcatgtccatggagaaccctggactgtggatcctgggctgccacaacagtgacttcaggaacaggggcatgactgccctgctgaaggtctccagctgtgacaagaacactggggactactatgaggactcctatgaggacatctctgcctacctgctgtccaagaacaatgccattgagcccaggtccttctcccagaacagcagacacccctccaccaggcagaagcagttcaatgcaaccaccatccctgaaaataccaccctgcagagtgaccaggaggagattgactatgatgacaccatctctgtggagatgaagaaggaggactttgacatctatgatgaggatgagaaccagagccctagaagcttccagaagaagaccagacactacttcattgctgcagtggaaagactgtgggactatgggatgagctcctccccccatgtgctgaggaacagggcccagtctggctctgtgccccagttcaagaaggtggtgttccaggagttcactgatggctccttcacccagcccctgtacaggggagagctgaatgagcacctgggcctgctgggcccctacatcagggctgaggtggaggacaatatcatggtgaccttcagaaaccaggcctccagaccttactccttctacagcagcctgatctcctatgaggaggaccagagacagggggctgagcccaggaagaactttgtgaagcccaatgagaccaagacctacttctggaaggtgcagcaccacatggcccccaccaaggatgagtttgactgcaaggcctgggcctacttctctgatgtggacctggagaaggatgtgcactctggcctgattggccccctgctggtgtgccacaccaacaccctgaaccctgcccatggcaggcaggtgactgtgcaggagtttgccctgttcttcaccatctttgatgagaccaagagctggtacttcactgagaacatggagaggaactgcagggccccctgcaacatccagatggaggaccccaccttcaaggagaactacaggttccatgccatcaatggctacatcatggacaccctgcctggcctggtgatggcccaggaccagaggatcaggtggtacctgctgagcatggggagcaatgagaacatccacagcatccacttctctggccatgtgttcacagtgaggaagaaggaggagtacaagatggccctgtacaacctgtaccctggggtgtttgagacagtggagatgctgccctccaaggctggaatctggagggtggagtgcctgattggggagcacctgcatgctggcatgagcaccctgttcctggtgtacagcaacaagtgccagacccccctgggcatggcctctggccacatcagagacttccagatcacagcctcaggccagtatggccagtgggcccccaagctggccaggctgcactactctggcagcatcaatgcctggtccaccaaggagcccttcagctggatcaaggtggacctcctggcccccatgatcatccatggcatcaagacccagggggccaggcagaagttcagctccctgtacatctcccagttcatcatcatgtactccctggatggcaagaagtggcagacctacagaggcaacagcacaggcaccctgatggtgttctttggcaatgtggacagctctgggatcaagcacaacatcttcaacccccccatcattgccaggtacatcagactgcaccccacccactactccatcaggtccaccctgagaatggagctgatgggctgtgacctgaacagctgcagcatgcccctgggcatggagagcaaggccatctctgatgcccagatcacagccagcagctacttcaccaacatgtttgccacctggtcccccagcaaggccaggctgcacctgcagggcaggagcaatgcctggaggccccaggtgaacaaccccaaggagtggctgcaggtggacttccagaagaccatgaaggtgacaggggtgaccacccagggggtgaagtccctgctgaccagcatgtatgtgaaggagttcctgatcagcagctcccaggatggccaccagtggaccctgttcttccagaatggcaaggtgaaggtgttccagggcaaccaggacagcttcacccctgtggtgaactccctggacccccccctgctgaccagatacctgaggatccacccccagtcctgggtgcaccagattgccctgagaatggaggtgctgggctgtgaggcccaggacctgtactga

SEQ ID NO: 161 - DNA, 4377 bp, Artificial Sequence
  Description of Artificial Sequence: Synthetic polynucleotide
atgcagctgctgagctgcattgccctgatcctggccctggtggccaccaggagatactacctgggggctgtggagctgtcctgggactacatgcagtcagacctgggggagctgccagttgatgccaggttcccccccagagtccccaagtccttccccttcaacacctcagtggtgtacaaaaagaccctgtttgtggagttcacagaccacctgttcaacatagccaagcccaggcccccctggatgggcctgctgggccccaccatccaggcagaggtttatgacacagtggtcatcaccctgaagaacatggcctcccaccctgtgtccctccatgctgtgggggtgagctactggaaggccagtgagggggcagaatatgatgaccagaccagccagagggagaaggaggatgacaaggtgttcccagggggcagccacacctatgtgtggcaggtcctgaaggagaatggccccatggcctctgaccccctctgcctcacctactcctacctgtcccatgtggacctggtgaaggacctcaactctggcctgattggagccctcctggtgtgcagggaggggagcctggccaaggaaaagacccagaccctgcacaagtttatcctgctctttgcagtctttgatgaggggaagtcctggcacagtgagaccaagaactccctgatgcaggacagagatgctgcctcagccagggcctggcccaagatgcacacagtgaatgggtatgtcaacaggagcctgccaggcctgattgggtgccacagaaagtcagtgtactggcatgtcattggcatgggcaccaccccagaggtgcactccatcttcctggagggccacaccttcctggtgaggaaccacagacaggccagcctggagatcagcccaatcaccttcctcacagcccagaccctcctcatggacctgggccagtttctcctgttctgccacatctcctcccaccagcatgatggcatggaggcctatgtgaaggtggacagctgccctgaggagccccagctcaggatgaagaacaatgaggaggcagaggactatgatgatgatctgacagactctgagatggatgtggtgagatttgatgatgacaacagcccctccttcatccagatcaggtctgtggccaagaagcaccctaagacctgggtgcactacattgcagctgaggaggaggactgggactatgcccccctggtcctggcccctgatgataggtcctacaagtcccagtacctgaacaatggcccccagaggatagggagaaagtacaagaaggtgaggttcatggcctacactgatgagaccttcaagactagggaagccatccagcatgagtctgggatcctgggccccctcctctatggggaggtgggggacaccctgctgatcatcttcaagaaccaggccagcaggccctacaacatttacccccatgggatcacagatgtgagacccctgtacagcaggagactgccaaagggggtgaagcacctgaaggacttccccatcctgccaggggagatcttcaagtacaagtggactgtgacagtggaggatgggcccaccaaatctgaccctagatgcctgaccagatactacagcagctttgtgaacatggagagggacctggcctctggactgattggccctctgctgatctgctacaaggagagtgtggaccagaggggaaaccagatcatgtctgacaagaggaatgtgatcctgttctcagtgtttgatgagaacagatcctggtacctcactgagaacatccagaggttcctgcccaacccagcaggggtgcagctggaggacccagagttccaggcctccaacatcatgcactccatcaatggctatgtctttgactccctgcagctgtcagtgtgcctgcatgaggtggcctactggtacatcctctccattggagcccagactgacttcctgtcagtcttcttcagtggctacaccttcaagcacaagatggtctatgaggacactctgaccctgttccccttctctggggagactgtgttcatgtccatggagaaccctggactgtggatcctgggctgccacaacagtgacttcaggaacaggggcatgactgccctgctgaaggtctccagctgtgacaagaacactggggactactatgaggactcctatgaggacatctctgcctacctgctgtccaagaacaatgccattgagcccaggtccttctcccagaacagcagacacccctccaccaggcagaagcagttcaatgcaaccaccatccctgaaaataccaccctgcagagtgaccaggaggagattgactatgatgacaccatctctgtggagatgaagaaggaggactttgacatctatgatgaggatgagaaccagagccctagaagcttccagaagaagaccagacactacttcattgctgcagtggaaagactgtgggactatgggatgagctcctccccccatgtgctgaggaacagggcccagtctggctctgtgccccagttcaagaaggtggtgttccaggagttcactgatggctccttcacccagcccctgtacaggggagagctgaatgagcacctgggcctgctgggcccctacatcagggctgaggtggaggacaatatcatggtgaccttcagaaaccaggcctccagaccttactccttctacagcagcctgatctcctatgaggaggaccagagacagggggctgagcccaggaagaactttgtgaagcccaatgagaccaagacctacttctggaaggtgcagcaccacatggcccccaccaaggatgagtttgactgcaaggcctgggcctacttctctgatgtggacctggagaaggatgtgcactctggcctgattggccccctgctggtgtgccacaccaacaccctgaaccctgcccatggcaggcaggtgactgtgcaggagtttgccctgttcttcaccatctttgatgagaccaagagctggtacttcactgagaacatggagaggaactgcagggccccctgcaacatccagatggaggaccccaccttcaaggagaactacaggttccatgccatcaatggctacatcatggacaccctgcctggcctggtgatggcccaggaccagaggatcaggtggtacctgctgagcatggggagcaatgagaacatccacagcatccacttctctggccatgtgttcacagtgaggaagaaggaggagtacaagatggccctgtacaacctgtaccctggggtgtttgagacagtggagatgctgccctccaaggctggaatctggagggtggagtgcctgattggggagcacctgcatgctggcatgagcaccctgttcctggtgtacagcaacaagtgccagacccccctgggcatggcctctggccacatcagagacttccagatcacagcctcaggccagtatggccagtgggcccccaagctggccaggctgcactactctggcagcatcaatgcctggtccaccaaggagcccttcagctggatcaaggtggacctcctggcccccatgatcatccatggcatcaagacccagggggccaggcagaagttcagctccctgtacatctcccagttcatcatcatgtactccctggatggcaagaagtggcagacctacagaggcaacagcacaggcaccctgatggtgttctttggcaatgtggacagctctgggatcaagcacaacatcttcaacccccccatcattgccaggtacatcagactgcaccccacccactactccatcaggtccaccctgagaatggagctgatgggctgtgacctgaacagctgcagcatgcccctgggcatggagagcaaggccatctctgatgcccagatcacagccagcagctacttcaccaacatgtttgccacctggtcccccagcaaggccaggctgcacctgcagggcaggagcaatgcctggaggccccaggtgaacaaccccaaggagtggctgcaggtggacttccagaagaccatgaaggtgacaggggtgaccacccagggggtgaagtccctgctgaccagcatgtatgtgaaggagttcctgatcagcagctcccaggatggccaccagtggaccctgttcttccagaatggcaaggtgaaggtgttccagggcaaccaggacagcttcacccctgtggtgaactccctggacccccccctgctgaccagatacctgaggatccacccccagtcctgggtgcaccagattgccctgagaatggaggtgctgggctgtgaggcccaggacctgtactga

SEQ ID NO: 162 - DNA, 4386 bp, Artificial Sequence
  Description of Artificial Sequence: Synthetic polynucleotide
atgggtgtgaaagttctttttgccttgatttgtattgctgttgctgaagcagccaccaggagatactacctgggggctgtggagctgtcctgggactacatgcagtcagacctgggggagctgccagttgatgccaggttcccccccagagtccccaagtccttccccttcaacacctcagtggtgtacaaaaagaccctgtttgtggagttcacagaccacctgttcaacatagccaagcccaggcccccctggatgggcctgctgggccccaccatccaggcagaggtttatgacacagtggtcatcaccctgaagaacatggcctcccaccctgtgtccctccatgctgtgggggtgagctactggaaggccagtgagggggcagaatatgatgaccagaccagccagagggagaaggaggatgacaaggtgttcccagggggcagccacacctatgtgtggcaggtcctgaaggagaatggccccatggcctctgaccccctctgcctcacctactcctacctgtcccatgtggacctggtgaaggacctcaactctggcctgattggagccctcctggtgtgcagggaggggagcctggccaaggaaaagacccagaccctgcacaagtttatcctgctctttgcagtctttgatgaggggaagtcctggcacagtgagaccaagaactccctgatgcaggacagagatgctgcctcagccagggcctggcccaagatgcacacagtgaatgggtatgtcaacaggagcctgccaggcctgattgggtgccacagaaagtcagtgtactggcatgtcattggcatgggcaccaccccagaggtgcactccatcttcctggagggccacaccttcctggtgaggaaccacagacaggccagcctggagatcagcccaatcaccttcctcacagcccagaccctcctcatggacctgggccagtttctcctgttctgccacatctcctcccaccagcatgatggcatggaggcctatgtgaaggtggacagctgccctgaggagccccagctcaggatgaagaacaatgaggaggcagaggactatgatgatgatctgacagactctgagatggatgtggtgagatttgatgatgacaacagcccctccttcatccagatcaggtctgtggccaagaagcaccctaagacctgggtgcactacattgcagctgaggaggaggactgggactatgcccccctggtcctggcccctgatgataggtcctacaagtcccagtacctgaacaatggcccccagaggatagggagaaagtacaagaaggtgaggttcatggcctacactgatgagaccttcaagactagggaagccatccagcatgagtctgggatcctgggccccctcctctatggggaggtgggggacaccctgctgatcatcttcaagaaccaggccagcaggccctacaacatttacccccatgggatcacagatgtgagacccctgtacagcaggagactgccaaagggggtgaagcacctgaaggacttccccatcctgccaggggagatcttcaagtacaagtggactgtgacagtggaggatgggcccaccaaatctgaccctagatgcctgaccagatactacagcagctttgtgaacatggagagggacctggcctctggactgattggccctctgctgatctgctacaaggagagtgtggaccagaggggaaaccagatcatgtctgacaagaggaatgtgatcctgttctcagtgtttgatgagaacagatcctggtacctcactgagaacatccagaggttcctgcccaacccagcaggggtgcagctggaggacccagagttccaggcctccaacatcatgcactccatcaatggctatgtctttgactccctgcagctgtcagtgtgcctgcatgaggtggcctactggtacatcctctccattggagcccagactgacttcctgtcagtcttcttcagtggctacaccttcaagcacaagatggtctatgaggacactctgaccctgttccccttctctggggagactgtgttcatgtccatggagaaccctggactgtggatcctgggctgccacaacagtgacttcaggaacaggggcatgactgccctgctgaaggtctccagctgtgacaagaacactggggactactatgaggactcctatgaggacatctctgcctacctgctgtccaagaacaatgccattgagcccaggtccttctcccagaacagcagacacccctccaccaggcagaagcagttcaatgcaaccaccatccctgaaaataccaccctgcagagtgaccaggaggagattgactatgatgacaccatctctgtggagatgaagaaggaggactttgacatctatgatgaggatgagaaccagagccctagaagcttccagaagaagaccagacactacttcattgctgcagtggaaagactgtgggactatgggatgagctcctccccccatgtgctgaggaacagggcccagtctggctctgtgccccagttcaagaaggtggtgttccaggagttcactgatggctccttcacccagcccctgtacaggggagagctgaatgagcacctgggcctgctgggcccctacatcagggctgaggtggaggacaatatcatggtgaccttcagaaaccaggcctccagaccttactccttctacagcagcctgatctcctatgaggaggaccagagacagggggctgagcccaggaagaactttgtgaagcccaatgagaccaagacctacttctggaaggtgcagcaccacatggcccccaccaaggatgagtttgactgcaaggcctgggcctacttctctgatgtggacctggagaaggatgtgcactctggcctgattggccccctgctggtgtgccacaccaacaccctgaaccctgcccatggcaggcaggtgactgtgcaggagtttgccctgttcttcaccatctttgatgagaccaagagctggtacttcactgagaacatggagaggaactgcagggccccctgcaacatccagatggaggaccccaccttcaaggagaactacaggttccatgccatcaatggctacatcatggacaccctgcctggcctggtgatggcccaggaccagaggatcaggtggtacctgctgagcatggggagcaatgagaacatccacagcatccacttctctggccatgtgttcacagtgaggaagaaggaggagtacaagatggccctgtacaacctgtaccctggggtgtttgagacagtggagatgctgccctccaaggctggaatctggagggtggagtgcctgattggggagcacctgcatgctggcatgagcaccctgttcctggtgtacagcaacaagtgccagacccccctgggcatggcctctggccacatcagagacttccagatcacagcctcaggccagtatggccagtgggcccccaagctggccaggctgcactactctggcagcatcaatgcctggtccaccaaggagcccttcagctggatcaaggtggacctcctggcccccatgatcatccatggcatcaagacccagggggccaggcagaagttcagctccctgtacatctcccagttcatcatcatgtactccctggatggcaagaagtggcagacctacagaggcaacagcacaggcaccctgatggtgttctttggcaatgtggacagctctgggatcaagcacaacatcttcaacccccccatcattgccaggtacatcagactgcaccccacccactactccatcaggtccaccctgagaatggagctgatgggctgtgacctgaacagctgcagcatgcccctgggcatggagagcaaggccatctctgatgcccagatcacagccagcagctacttcaccaacatgtttgccacctggtcccccagcaaggccaggctgcacctgcagggcaggagcaatgcctggaggccccaggtgaacaaccccaaggagtggctgcaggtggacttccagaagaccatgaaggtgacaggggtgaccacccagggggtgaagtccctgctgaccagcatgtatgtgaaggagttcctgatcagcagctcccaggatggccaccagtggaccctgttcttccagaatggcaaggtgaaggtgttccagggcaaccaggacagcttcacccctgtggtgaactccctggacccccccctgctgaccagatacctgaggatccacccccagtcctgggtgcaccagattgccctgagaatggaggtgctgggctgtgaggcccaggacctgtactga

SEQ ID NO: 163 - DNA, 4386 bp, Artificial Sequence
  Description of Artificial Sequence: Synthetic polynucleotide
atgggggtgaaggtgctgtttgccctgatctgcattgctgtggctgaggctgccaccaggagatactacctgggggctgtggagctgtcctgggactacatgcagtcagacctgggggagctgccagttgatgccaggttcccccccagagtccccaagtccttccccttcaacacctcagtggtgtacaaaaagaccctgtttgtggagttcacagaccacctgttcaacatagccaagcccaggcccccctggatgggcctgctgggccccaccatccaggcagaggtttatgacacagtggtcatcaccctgaagaacatggcctcccaccctgtgtccctccatgctgtgggggtgagctactggaaggccagtgagggggcagaatatgatgaccagaccagccagagggagaaggaggatgacaaggtgttcccagggggcagccacacctatgtgtggcaggtcctgaaggagaatggccccatggcctctgaccccctctgcctcacctactcctacctgtcccatgtggacctggtgaaggacctcaactctggcctgattggagccctcctggtgtgcagggaggggagcctggccaaggaaaagacccagaccctgcacaagtttatcctgctctttgcagtctttgatgaggggaagtcctggcacagtgagaccaagaactccctgatgcaggacagagatgctgcctcagccagggcctggcccaagatgcacacagtgaatgggtatgtcaacaggagcctgccaggcctgattgggtgccacagaaagtcagtgtactggcatgtcattggcatgggcaccaccccagaggtgcactccatcttcctggagggccacaccttcctggtgaggaaccacagacaggccagcctggagatcagcccaatcaccttcctcacagcccagaccctcctcatggacctgggccagtttctcctgttctgccacatctcctcccaccagcatgatggcatggaggcctatgtgaaggtggacagctgccctgaggagccccagctcaggatgaagaacaatgaggaggcagaggactatgatgatgatctgacagactctgagatggatgtggtgagatttgatgatgacaacagcccctccttcatccagatcaggtctgtggccaagaagcaccctaagacctgggtgcactacattgcagctgaggaggaggactgggactatgcccccctggtcctggcccctgatgataggtcctacaagtcccagtacctgaacaatggcccccagaggatagggagaaagtacaagaaggtgaggttcatggcctacactgatgagaccttcaagactagggaagccatccagcatgagtctgggatcctgggccccctcctctatggggaggtgggggacaccctgctgatcatcttcaagaaccaggccagcaggccctacaacatttacccccatgggatcacagatgtgagacccctgtacagcaggagactgccaaagggggtgaagcacctgaaggacttccccatcctgccaggggagatcttcaagtacaagtggactgtgacagtggaggatgggcccaccaaatctgaccctagatgcctgaccagatactacagcagctttgtgaacatggagagggacctggcctctggactgattggccctctgctgatctgctacaaggagagtgtggaccagaggggaaaccagatcatgtctgacaagaggaatgtgatcctgttctcagtgtttgatgagaacagatcctggtacctcactgagaacatccagaggttcctgcccaacccagcaggggtgcagctggaggacccagagttccaggcctccaacatcatgcactccatcaatggctatgtctttgactccctgcagctgtcagtgtgcctgcatgaggtggcctactggtacatcctctccattggagcccagactgacttcctgtcagtcttcttcagtggctacaccttcaagcacaagatggtctatgaggacactctgaccctgttccccttctctggggagactgtgttcatgtccatggagaaccctggactgtggatcctgggctgccacaacagtgacttcaggaacaggggcatgactgccctgctgaaggtctccagctgtgacaagaacactggggactactatgaggactcctatgaggacatctctgcctacctgctgtccaagaacaatgccattgagcccaggtccttctcccagaacagcagacacccctccaccaggcagaagcagttcaatgcaaccaccatccctgaaaataccaccctgcagagtgaccaggaggagattgactatgatgacaccatctctgtggagatgaagaaggaggactttgacatctatgatgaggatgagaaccagagccctagaagcttccagaagaagaccagacactacttcattgctgcagtggaaagactgtgggactatgggatgagctcctccccccatgtgctgaggaacagggcccagtctggctctgtgccccagttcaagaaggtggtgttccaggagttcactgatggctccttcacccagcccctgtacaggggagagctgaatgagcacctgggcctgctgggcccctacatcagggctgaggtggaggacaatatcatggtgaccttcagaaaccaggcctccagaccttactccttctacagcagcctgatctcctatgaggaggaccagagacagggggctgagcccaggaagaactttgtgaagcccaatgagaccaagacctacttctggaaggtgcagcaccacatggcccccaccaaggatgagtttgactgcaaggcctgggcctacttctctgatgtggacctggagaaggatgtgcactctggcctgattggccccctgctggtgtgccacaccaacaccctgaaccctgcccatggcaggcaggtgactgtgcaggagtttgccctgttcttcaccatctttgatgagaccaagagctggtacttcactgagaacatggagaggaactgcagggccccctgcaacatccagatggaggaccccaccttcaaggagaactacaggttccatgccatcaatggctacatcatggacaccctgcctggcctggtgatggcccaggaccagaggatcaggtggtacctgctgagcatggggagcaatgagaacatccacagcatccacttctctggccatgtgttcacagtgaggaagaaggaggagtacaagatggccctgtacaacctgtaccctggggtgtttgagacagtggagatgctgccctccaaggctggaatctggagggtggagtgcctgattggggagcacctgcatgctggcatgagcaccctgttcctggtgtacagcaacaagtgccagacccccctgggcatggcctctggccacatcagagacttccagatcacagcctcaggccagtatggccagtgggcccccaagctggccaggctgcactactctggcagcatcaatgcctggtccaccaaggagcccttcagctggatcaaggtggacctcctggcccccatgatcatccatggcatcaagacccagggggccaggcagaagttcagctccctgtacatctcccagttcatcatcatgtactccctggatggcaagaagtggcagacctacagaggcaacagcacaggcaccctgatggtgttctttggcaatgtggacagctctgggatcaagcacaacatcttcaacccccccatcattgccaggtacatcagactgcaccccacccactactccatcaggtccaccctgagaatggagctgatgggctgtgacctgaacagctgcagcatgcccctgggcatggagagcaaggccatctctgatgcccagatcacagccagcagctacttcaccaacatgtttgccacctggtcccccagcaaggccaggctgcacctgcagggcaggagcaatgcctggaggccccaggtgaacaaccccaaggagtggctgcaggtggacttccagaagaccatgaaggtgacaggggtgaccacccagggggtgaagtccctgctgaccagcatgtatgtgaaggagttcctgatcagcagctcccaggatggccaccagtggaccctgttcttccagaatggcaaggtgaaggtgttccagggcaaccaggacagcttcacccctgtggtgaactccctggacccccccctgctgaccagatacctgaggatccacccccagtcctgggtgcaccagattgccctgagaatggaggtgctgggctgtgaggcccaggacctgtactga

SEQ ID NO: 164 - DNA, 4389 bp, Artificial Sequence
  Description of Artificial Sequence: Synthetic polynucleotide
atggcatttttatggcttttatcttgctgggcacttttaggaactacatttggagccaccaggagatactacctgggggctgtggagctgtcctgggactacatgcagtcagacctgggggagctgccagttgatgccaggttcccccccagagtccccaagtccttccccttcaacacctcagtggtgtacaaaaagaccctgtttgtggagttcacagaccacctgttcaacatagccaagcccaggcccccctggatgggcctgctgggccccaccatccaggcagaggtttatgacacagtggtcatcaccctgaagaacatggcctcccaccctgtgtccctccatgctgtgggggtgagctactggaaggccagtgagggggcagaatatgatgaccagaccagccagagggagaaggaggatgacaaggtgttcccagggggcagccacacctatgtgtggcaggtcctgaaggagaatggccccatggcctctgaccccctctgcctcacctactcctacctgtcccatgtggacctggtgaaggacctcaactctggcctgattggagccctcctggtgtgcagggaggggagcctggccaaggaaaagacccagaccctgcacaagtttatcctgctctttgcagtctttgatgaggggaagtcctggcacagtgagaccaagaactccctgatgcaggacagagatgctgcctcagccagggcctggcccaagatgcacacagtgaatgggtatgtcaacaggagcctgccaggcctgattgggtgccacagaaagtcagtgtactggcatgtcattggcatgggcaccaccccagaggtgcactccatcttcctggagggccacaccttcctggtgaggaaccacagacaggccagcctggagatcagcccaatcaccttcctcacagcccagaccctcctcatggacctgggccagtttctcctgttctgccacatctcctcccaccagcatgatggcatggaggcctatgtgaaggtggacagctgccctgaggagccccagctcaggatgaagaacaatgaggaggcagaggactatgatgatgatctgacagactctgagatggatgtggtgagatttgatgatgacaacagcccctccttcatccagatcaggtctgtggccaagaagcaccctaagacctgggtgcactacattgcagctgaggaggaggactgggactatgcccccctggtcctggcccctgatgataggtcctacaagtcccagtacctgaacaatggcccccagaggatagggagaaagtacaagaaggtgaggttcatggcctacactgatgagaccttcaagactagggaagccatccagcatgagtctgggatcctgggccccctcctctatggggaggtgggggacaccctgctgatcatcttcaagaaccaggccagcaggccctacaacatttacccccatgggatcacagatgtgagacccctgtacagcaggagactgccaaagggggtgaagcacctgaaggacttccccatcctgccaggggagatcttcaagtacaagtggactgtgacagtggaggatgggcccaccaaatctgaccctagatgcctgaccagatactacagcagctttgtgaacatggagagggacctggcctctggactgattggccctctgctgatctgctacaaggagagtgtggaccagaggggaaaccagatcatgtctgacaagaggaatgtgatcctgttctcagtgtttgatgagaacagatcctggtacctcactgagaacatccagaggttcctgcccaacccagcaggggtgcagctggaggacccagagttccaggcctccaacatcatgcactccatcaatggctatgtctttgactccctgcagctgtcagtgtgcctgcatgaggtggcctactggtacatcctctccattggagcccagactgacttcctgtcagtcttcttcagtggctacaccttcaagcacaagatggtctatgaggacactctgaccctgttccccttctctggggagactgtgttcatgtccatggagaaccctggactgtggatcctgggctgccacaacagtgacttcaggaacaggggcatgactgccctgctgaaggtctccagctgtgacaagaacactggggactactatgaggactcctatgaggacatctctgcctacctgctgtccaagaacaatgccattgagcccaggtccttctcccagaacagcagacacccctccaccaggcagaagcagttcaatgcaaccaccatccctgaaaataccaccctgcagagtgaccaggaggagattgactatgatgacaccatctctgtggagatgaagaaggaggactttgacatctatgatgaggatgagaaccagagccctagaagcttccagaagaagaccagacactacttcattgctgcagtggaaagactgtgggactatgggatgagctcctccccccatgtgctgaggaacagggcccagtctggctctgtgccccagttcaagaaggtggtgttccaggagttcactgatggctccttcacccagcccctgtacaggggagagctgaatgagcacctgggcctgctgggcccctacatcagggctgaggtggaggacaatatcatggtgaccttcagaaaccaggcctccagaccttactccttctacagcagcctgatctcctatgaggaggaccagagacagggggctgagcccaggaagaactttgtgaagcccaatgagaccaagacctacttctggaaggtgcagcaccacatggcccccaccaaggatgagtttgactgcaaggcctgggcctacttctctgatgtggacctggagaaggatgtgcactctggcctgattggccccctgctggtgtgccacaccaacaccctgaaccctgcccatggcaggcaggtgactgtgcaggagtttgccctgttcttcaccatctttgatgagaccaagagctggtacttcactgagaacatggagaggaactgcagggccccctgcaacatccagatggaggaccccaccttcaaggagaactacaggttccatgccatcaatggctacatcatggacaccctgcctggcctggtgatggcccaggaccagaggatcaggtggtacctgctgagcatggggagcaatgagaacatccacagcatccacttctctggccatgtgttcacagtgaggaagaaggaggagtacaagatggccctgtacaacctgtaccctggggtgtttgagacagtggagatgctgccctccaaggctggaatctggagggtggagtgcctgattggggagcacctgcatgctggcatgagcaccctgttcctggtgtacagcaacaagtgccagacccccctgggcatggcctctggccacatcagagacttccagatcacagcctcaggccagtatggccagtgggcccccaagctggccaggctgcactactctggcagcatcaatgcctggtccaccaaggagcccttcagctggatcaaggtggacctcctggcccccatgatcatccatggcatcaagacccagggggccaggcagaagttcagctccctgtacatctcccagttcatcatcatgtactccctggatggcaagaagtggcagacctacagaggcaacagcacaggcaccctgatggtgttctttggcaatgtggacagctctgggatcaagcacaacatcttcaacccccccatcattgccaggtacatcagactgcaccccacccactactccatcaggtccaccctgagaatggagctgatgggctgtgacctgaacagctgcagcatgcccctgggcatggagagcaaggccatctctgatgcccagatcacagccagcagctacttcaccaacatgtttgccacctggtcccccagcaaggccaggctgcacctgcagggcaggagcaatgcctggaggccccaggtgaacaaccccaaggagtggctgcaggtggacttccagaagaccatgaaggtgacaggggtgaccacccagggggtgaagtccctgctgaccagcatgtatgtgaaggagttcctgatcagcagctcccaggatggccaccagtggaccctgttcttccagaatggcaaggtgaaggtgttccagggcaaccaggacagcttcacccctgtggtgaactccctggacccccccctgctgaccagatacctgaggatccacccccagtcctgggtgcaccagattgccctgagaatggaggtgctgggctgtgaggcccaggacctgtactga

SEQ ID NO: 165 - DNA, 4389 bp, Artificial Sequence
  Description of Artificial Sequence: Synthetic polynucleotide
atggccttcctgtggctgctgagctgctgggccctgctgggcaccacctttggagccaccaggagatactacctgggggctgtggagctgtcctgggactacatgcagtcagacctgggggagctgccagttgatgccaggttcccccccagagtccccaagtccttccccttcaacacctcagtggtgtacaaaaagaccctgtttgtggagttcacagaccacctgttcaacatagccaagcccaggcccccctggatgggcctgctgggccccaccatccaggcagaggtttatgacacagtggtcatcaccctgaagaacatggcctcccaccctgtgtccctccatgctgtgggggtgagctactggaaggccagtgagggggcagaatatgatgaccagaccagccagagggagaaggaggatgacaaggtgttcccagggggcagccacacctatgtgtggcaggtcctgaaggagaatggccccatggcctctgaccccctctgcctcacctactcctacctgtcccatgtggacctggtgaaggacctcaactctggcctgattggagccctcctggtgtgcagggaggggagcctggccaaggaaaagacccagaccctgcacaagtttatcctgctctttgcagtctttgatgaggggaagtcctggcacagtgagaccaagaactccctgatgcaggacagagatgctgcctcagccagggcctggcccaagatgcacacagtgaatgggtatgtcaacaggagcctgccaggcctgattgggtgccacagaaagtcagtgtactggcatgtcattggcatgggcaccaccccagaggtgcactccatcttcctggagggccacaccttcctggtgaggaaccacagacaggccagcctggagatcagcccaatcaccttcctcacagcccagaccctcctcatggacctgggccagtttctcctgttctgccacatctcctcccaccagcatgatggcatggaggcctatgtgaaggtggacagctgccctgaggagccccagctcaggatgaagaacaatgaggaggcagaggactatgatgatgatctgacagactctgagatggatgtggtgagatttgatgatgacaacagcccctccttcatccagatcaggtctgtggccaagaagcaccctaagacctgggtgcactacattgcagctgaggaggaggactgggactatgcccccctggtcctggcccctgatgataggtcctacaagtcccagtacctgaacaatggcccccagaggatagggagaaagtacaagaaggtgaggttcatggcctacactgatgagaccttcaagactagggaagccatccagcatgagtctgggatcctgggccccctcctctatggggaggtgggggacaccctgctgatcatcttcaagaaccaggccagcaggccctacaacatttacccccatgggatcacagatgtgagacccctgtacagcaggagactgccaaagggggtgaagcacctgaaggacttccccatcctgccaggggagatcttcaagtacaagtggactgtgacagtggaggatgggcccaccaaatctgaccctagatgcctgaccagatactacagcagctttgtgaacatggagagggacctggcctctggactgattggccctctgctgatctgctacaaggagagtgtggaccagaggggaaaccagatcatgtctgacaagaggaatgtgatcctgttctcagtgtttgatgagaacagatcctggtacctcactgagaacatccagaggttcctgcccaacccagcaggggtgcagctggaggacccagagttccaggcctccaacatcatgcactccatcaatggctatgtctttgactccctgcagctgtcagtgtgcctgcatgaggtggcctactggtacatcctctccattggagcccagactgacttcctgtcagtcttcttcagtggctacaccttcaagcacaagatggtctatgaggacactctgaccctgttccccttctctggggagactgtgttcatgtccatggagaaccctggactgtggatcctgggctgccacaacagtgacttcaggaacaggggcatgactgccctgctgaaggtctccagctgtgacaagaacactggggactactatgaggactcctatgaggacatctctgcctacctgctgtccaagaacaatgccattgagcccaggtccttctcccagaacagcagacacccctccaccaggcagaagcagttcaatgcaaccaccatccctgaaaataccaccctgcagagtgaccaggaggagattgactatgatgacaccatctctgtggagatgaagaaggaggactttgacatctatgatgaggatgagaaccagagccctagaagcttccagaagaagaccagacactacttcattgctgcagtggaaagactgtgggactatgggatgagctcctccccccatgtgctgaggaacagggcccagtctggctctgtgccccagttcaagaaggtggtgttccaggagttcactgatggctccttcacccagcccctgtacaggggagagctgaatgagcacctgggcctgctgggcccctacatcagggctgaggtggaggacaatatcatggtgaccttcagaaaccaggcctccagaccttactccttctacagcagcctgatctcctatgaggaggaccagagacagggggctgagcccaggaagaactttgtgaagcccaatgagaccaagacctacttctggaaggtgcagcaccacatggcccccaccaaggatgagtttgactgcaaggcctgggcctacttctctgatgtggacctggagaaggatgtgcactctggcctgattggccccctgctggtgtgccacaccaacaccctgaaccctgcccatggcaggcaggtgactgtgcaggagtttgccctgttcttcaccatctttgatgagaccaagagctggtacttcactgagaacatggagaggaactgcagggccccctgcaacatccagatggaggaccccaccttcaaggagaactacaggttccatgccatcaatggctacatcatggacaccctgcctggcctggtgatggcccaggaccagaggatcaggtggtacctgctgagcatggggagcaatgagaacatccacagcatccacttctctggccatgtgttcacagtgaggaagaaggaggagtacaagatggccctgtacaacctgtaccctggggtgtttgagacagtggagatgctgccctccaaggctggaatctggagggtggagtgcctgattggggagcacctgcatgctggcatgagcaccctgttcctggtgtacagcaacaagtgccagacccccctgggcatggcctctggccacatcagagacttccagatcacagcctcaggccagtatggccagtgggcccccaagctggccaggctgcactactctggcagcatcaatgcctggtccaccaaggagcccttcagctggatcaaggtggacctcctggcccccatgatcatccatggcatcaagacccagggggccaggcagaagttcagctccctgtacatctcccagttcatcatcatgtactccctggatggcaagaagtggcagacctacagaggcaacagcacaggcaccctgatggtgttctttggcaatgtggacagctctgggatcaagcacaacatcttcaacccccccatcattgccaggtacatcagactgcaccccacccactactccatcaggtccaccctgagaatggagctgatgggctgtgacctgaacagctgcagcatgcccctgggcatggagagcaaggccatctctgatgcccagatcacagccagcagctacttcaccaacatgtttgccacctggtcccccagcaaggccaggctgcacctgcagggcaggagcaatgcctggaggccccaggtgaacaaccccaaggagtggctgcaggtggacttccagaagaccatgaaggtgacaggggtgaccacccagggggtgaagtccctgctgaccagcatgtatgtgaaggagttcctgatcagcagctcccaggatggccaccagtggaccctgttcttccagaatggcaaggtgaaggtgttccagggcaaccaggacagcttcacccctgtggtgaactccctggacccccccctgctgaccagatacctgaggatccacccccagtcctgggtgcaccagattgccctgagaatggaggtgctgggctgtgaggcccaggacctgtactga

SEQ ID NO: 166 - DNA, 4407 bp, Artificial Sequence
  Description of Artificial Sequence: Synthetic polynucleotide
atgccaagttcagttagttggggaatattattacttgctggcctttgttgccttgttcctgtatctttagccgccaccaggagatactacctgggggctgtggagctgtcctgggactacatgcagtcagacctgggggagctgccagttgatgccaggttcccccccagagtccccaagtccttccccttcaacacctcagtggtgtacaaaaagaccctgtttgtggagttcacagaccacctgttcaacatagccaagcccaggcccccctggatgggcctgctgggccccaccatccaggcagaggtttatgacacagtggtcatcaccctgaagaacatggcctcccaccctgtgtccctccatgctgtgggggtgagctactggaaggccagtgagggggcagaatatgatgaccagaccagccagagggagaaggaggatgacaaggtgttcccagggggcagccacacctatgtgtggcaggtcctgaaggagaatggccccatggcctctgaccccctctgcctcacctactcctacctgtcccatgtggacctggtgaaggacctcaactctggcctgattggagccctcctggtgtgcagggaggggagcctggccaaggaaaagacccagaccctgcacaagtttatcctgctctttgcagtctttgatgaggggaagtcctggcacagtgagaccaagaactccctgatgcaggacagagatgctgcctcagccagggcctggcccaagatgcacacagtgaatgggtatgtcaacaggagcctgccaggcctgattgggtgccacagaaagtcagtgtactggcatgtcattggcatgggcaccaccccagaggtgcactccatcttcctggagggccacaccttcctggtgaggaaccacagacaggccagcctggagatcagcccaatcaccttcctcacagcccagaccctcctcatggacctgggccagtttctcctgttctgccacatctcctcccaccagcatgatggcatggaggcctatgtgaaggtggacagctgccctgaggagccccagctcaggatgaagaacaatgaggaggcagaggactatgatgatgatctgacagactctgagatggatgtggtgagatttgatgatgacaacagcccctccttcatccagatcaggtctgtggccaagaagcaccctaagacctgggtgcactacattgcagctgaggaggaggactgggactatgcccccctggtcctggcccctgatgataggtcctacaagtcccagtacctgaacaatggcccccagaggatagggagaaagtacaagaaggtgaggttcatggcctacactgatgagaccttcaagactagggaagccatccagcatgagtctgggatcctgggccccctcctctatggggaggtgggggacaccctgctgatcatcttcaagaaccaggccagcaggccctacaacatttacccccatgggatcacagatgtgagacccctgtacagcaggagactgccaaagggggtgaagcacctgaaggacttccccatcctgccaggggagatcttcaagtacaagtggactgtgacagtggaggatgggcccaccaaatctgaccctagatgcctgaccagatactacagcagctttgtgaacatggagagggacctggcctctggactgattggccctctgctgatctgctacaaggagagtgtggaccagaggggaaaccagatcatgtctgacaagaggaatgtgatcctgttctcagtgtttgatgagaacagatcctggtacctcactgagaacatccagaggttcctgcccaacccagcaggggtgcagctggaggacccagagttccaggcctccaacatcatgcactccatcaatggctatgtctttgactccctgcagctgtcagtgtgcctgcatgaggtggcctactggtacatcctctccattggagcccagactgacttcctgtcagtcttcttcagtggctacaccttcaagcacaagatggtctatgaggacactctgaccctgttccccttctctggggagactgtgttcatgtccatggagaaccctggactgtggatcctgggctgccacaacagtgacttcaggaacaggggcatgactgccctgctgaaggtctccagctgtgacaagaacactggggactactatgaggactcctatgaggacatctctgcctacctgctgtccaagaacaatgccattgagcccaggtccttctcccagaacagcagacacccctccaccaggcagaagcagttcaatgcaaccaccatccctgaaaataccaccctgcagagtgaccaggaggagattgactatgatgacaccatctctgtggagatgaagaaggaggactttgacatctatgatgaggatgagaaccagagccctagaagcttccagaagaagaccagacactacttcattgctgcagtggaaagactgtgggactatgggatgagctcctccccccatgtgctgaggaacagggcccagtctggctctgtgccccagttcaagaaggtggtgttccaggagttcactgatggctccttcacccagcccctgtacaggggagagctgaatgagcacctgggcctgctgggcccctacatcagggctgaggtggaggacaatatcatggtgaccttcagaaaccaggcctccagaccttactccttctacagcagcctgatctcctatgaggaggaccagagacagggggctgagcccaggaagaactttgtgaagcccaatgagaccaagacctacttctggaaggtgcagcaccacatggcccccaccaaggatgagtttgactgcaaggcctgggcctacttctctgatgtggacctggagaaggatgtgcactctggcctgattggccccctgctggtgtgccacaccaacaccctgaaccctgcccatggcaggcaggtgactgtgcaggagtttgccctgttcttcaccatctttgatgagaccaagagctggtacttcactgagaacatggagaggaactgcagggccccctgcaacatccagatggaggaccccaccttcaaggagaactacaggttccatgccatcaatggctacatcatggacaccctgcctggcctggtgatggcccaggaccagaggatcaggtggtacctgctgagcatggggagcaatgagaacatccacagcatccacttctctggccatgtgttcacagtgaggaagaaggaggagtacaagatggccctgtacaacctgtaccctggggtgtttgagacagtggagatgctgccctccaaggctggaatctggagggtggagtgcctgattggggagcacctgcatgctggcatgagcaccctgttcctggtgtacagcaacaagtgccagacccccctgggcatggcctctggccacatcagagacttccagatcacagcctcaggccagtatggccagtgggcccccaagctggccaggctgcactactctggcagcatcaatgcctggtccaccaaggagcccttcagctggatcaaggtggacctcctggcccccatgatcatccatggcatcaagacccagggggccaggcagaagttcagctccctgtacatctcccagttcatcatcatgtactccctggatggcaagaagtggcagacctacagaggcaacagcacaggcaccctgatggtgttctttggcaatgtggacagctctgggatcaagcacaacatcttcaacccccccatcattgccaggtacatcagactgcaccccacccactactccatcaggtccaccctgagaatggagctgatgggctgtgacctgaacagctgcagcatgcccctgggcatggagagcaaggccatctctgatgcccagatcacagccagcagctacttcaccaacatgtttgccacctggtcccccagcaaggccaggctgcacctgcagggcaggagcaatgcctggaggccccaggtgaacaaccccaaggagtggctgcaggtggacttccagaagaccatgaaggtgacaggggtgaccacccagggggtgaagtccctgctgaccagcatgtatgtgaaggagttcctgatcagcagctcccaggatggccaccagtggaccctgttcttccagaatggcaaggtgaaggtgttccagggcaaccaggacagcttcacccctgtggtgaactccctggacccccccctgctgaccagatacctgaggatccacccccagtcctgggtgcaccagattgccctgagaatggaggtgctgggctgtgaggcccaggacctgtactga

SEQ ID NO: 167 - DNA, 4407 bp, Artificial Sequence
  Description of Artificial Sequence: Synthetic polynucleotide
atgcccagctctgtgagctggggcatcctgctgctggctggcctgtgctgcctggtgcctgtgagcctggcagccaccaggagatactacctgggggctgtggagctgtcctgggactacatgcagtcagacctgggggagctgccagttgatgccaggttcccccccagagtccccaagtccttccccttcaacacctcagtggtgtacaaaaagaccctgtttgtggagttcacagaccacctgttcaacatagccaagcccaggcccccctggatgggcctgctgggccccaccatccaggcagaggtttatgacacagtggtcatcaccctgaagaacatggcctcccaccctgtgtccctccatgctgtgggggtgagctactggaaggccagtgagggggcagaatatgatgaccagaccagccagagggagaaggaggatgacaaggtgttcccagggggcagccacacctatgtgtggcaggtcctgaaggagaatggccccatggcctctgaccccctctgcctcacctactcctacctgtcccatgtggacctggtgaaggacctcaactctggcctgattggagccctcctggtgtgcagggaggggagcctggccaaggaaaagacccagaccctgcacaagtttatcctgctctttgcagtctttgatgaggggaagtcctggcacagtgagaccaagaactccctgatgcaggacagagatgctgcctcagccagggcctggcccaagatgcacacagtgaatgggtatgtcaacaggagcctgccaggcctgattgggtgccacagaaagtcagtgtactggcatgtcattggcatgggcaccaccccagaggtgcactccatcttcctggagggccacaccttcctggtgaggaaccacagacaggccagcctggagatcagcccaatcaccttcctcacagcccagaccctcctcatggacctgggccagtttctcctgttctgccacatctcctcccaccagcatgatggcatggaggcctatgtgaaggtggacagctgccctgaggagccccagctcaggatgaagaacaatgaggaggcagaggactatgatgatgatctgacagactctgagatggatgtggtgagatttgatgatgacaacagcccctccttcatccagatcaggtctgtggccaagaagcaccctaagacctgggtgcactacattgcagctgaggaggaggactgggactatgcccccctggtcctggcccctgatgataggtcctacaagtcccagtacctgaacaatggcccccagaggatagggagaaagtacaagaaggtgaggttcatggcctacactgatgagaccttcaagactagggaagccatccagcatgagtctgggatcctgggccccctcctctatggggaggtgggggacaccctgctgatcatcttcaagaaccaggccagcaggccctacaacatttacccccatgggatcacagatgtgagacccctgtacagcaggagactgccaaagggggtgaagcacctgaaggacttccccatcctgccaggggagatcttcaagtacaagtggactgtgacagtggaggatgggcccaccaaatctgaccctagatgcctgaccagatactacagcagctttgtgaacatggagagggacctggcctctggactgattggccctctgctgatctgctacaaggagagtgtggaccagaggggaaaccagatcatgtctgacaagaggaatgtgatcctgttctcagtgtttgatgagaacagatcctggtacctcactgagaacatccagaggttcctgcccaacccagcaggggtgcagctggaggacccagagttccaggcctccaacatcatgcactccatcaatggctatgtctttgactccctgcagctgtcagtgtgcctgcatgaggtggcctactggtacatcctctccattggagcccagactgacttcctgtcagtcttcttcagtggctacaccttcaagcacaagatggtctatgaggacactctgaccctgttccccttctctggggagactgtgttcatgtccatggagaaccctggactgtggatcctgggctgccacaacagtgacttcaggaacaggggcatgactgccctgctgaaggtctccagctgtgacaagaacactggggactactatgaggactcctatgaggacatctctgcctacctgctgtccaagaacaatgccattgagcccaggtccttctcccagaacagcagacacccctccaccaggcagaagcagttcaatgcaaccaccatccctgaaaataccaccctgcagagtgaccaggaggagattgactatgatgacaccatctctgtggagatgaagaaggaggactttgacatctatgatgaggatgagaaccagagccctagaagcttccagaagaagaccagacactacttcattgctgcagtggaaagactgtgggactatgggatgagctcctccccccatgtgctgaggaacagggcccagtctggctctgtgccccagttcaagaaggtggtgttccaggagttcactgatggctccttcacccagcccctgtacaggggagagctgaatgagcacctgggcctgctgggcccctacatcagggctgaggtggaggacaatatcatggtgaccttcagaaaccaggcctccagaccttactccttctacagcagcctgatctcctatgaggaggaccagagacagggggctgagcccaggaagaactttgtgaagcccaatgagaccaagacctacttctggaaggtgcagcaccacatggcccccaccaaggatgagtttgactgcaaggcctgggcctacttctctgatgtggacctggagaaggatgtgcactctggcctgattggccccctgctggtgtgccacaccaacaccctgaaccctgcccatggcaggcaggtgactgtgcaggagtttgccctgttcttcaccatctttgatgagaccaagagctggtacttcactgagaacatggagaggaactgcagggccccctgcaacatccagatggaggaccccaccttcaaggagaactacaggttccatgccatcaatggctacatcatggacaccctgcctggcctggtgatggcccaggaccagaggatcaggtggtacctgctgagcatggggagcaatgagaacatccacagcatccacttctctggccatgtgttcacagtgaggaagaaggaggagtacaagatggccctgtacaacctgtaccctggggtgtttgagacagtggagatgctgccctccaaggctggaatctggagggtggagtgcctgattggggagcacctgcatgctggcatgagcaccctgttcctggtgtacagcaacaagtgccagacccccctgggcatggcctctggccacatcagagacttccagatcacagcctcaggccagtatggccagtgggcccccaagctggccaggctgcactactctggcagcatcaatgcctggtccaccaaggagcccttcagctggatcaaggtggacctcctggcccccatgatcatccatggcatcaagacccagggggccaggcagaagttcagctccctgtacatctcccagttcatcatcatgtactccctggatggcaagaagtggcagacctacagaggcaacagcacaggcaccctgatggtgttctttggcaatgtggacagctctgggatcaagcacaacatcttcaacccccccatcattgccaggtacatcagactgcaccccacccactactccatcaggtccaccctgagaatggagctgatgggctgtgacctgaacagctgcagcatgcccctgggcatggagagcaaggccatctctgatgcccagatcacagccagcagctacttcaccaacatgtttgccacctggtcccccagcaaggccaggctgcacctgcagggcaggagcaatgcctggaggccccaggtgaacaaccccaaggagtggctgcaggtggacttccagaagaccatgaaggtgacaggggtgaccacccagggggtgaagtccctgctgaccagcatgtatgtgaaggagttcctgatcagcagctcccaggatggccaccagtggaccctgttcttccagaatggcaaggtgaaggtgttccagggcaaccaggacagcttcacccctgtggtgaactccctggacccccccctgctgaccagatacctgaggatccacccccagtcctgggtgcaccagattgccctgagaatggaggtgctgggctgtgaggcccaggacctgtactga

SEQ ID NO: 168 - DNA, 4383 bp, Artificial Sequence
  Description of Artificial Sequence: Synthetic polynucleotide
atgccattactgctactgttaccactactttgggctggtgcacttgctgccaccaggagatactacctgggggctgtggagctgtcctgggactacatgcagtcagacctgggggagctgccagttgatgccaggttcccccccagagtccccaagtccttccccttcaacacctcagtggtgtacaaaaagaccctgtttgtggagttcacagaccacctgttcaacatagccaagcccaggcccccctggatgggcctgctgggccccaccatccaggcagaggtttatgacacagtggtcatcaccctgaagaacatggcctcccaccctgtgtccctccatgctgtgggggtgagctactggaaggccagtgagggggcagaatatgatgaccagaccagccagagggagaaggaggatgacaaggtgttcccagggggcagccacacctatgtgtggcaggtcctgaaggagaatggccccatggcctctgaccccctctgcctcacctactcctacctgtcccatgtggacctggtgaaggacctcaactctggcctgattggagccctcctggtgtgcagggaggggagcctggccaaggaaaagacccagaccctgcacaagtttatcctgctctttgcagtctttgatgaggggaagtcctggcacagtgagaccaagaactccctgatgcaggacagagatgctgcctcagccagggcctggcccaagatgcacacagtgaatgggtatgtcaacaggagcctgccaggcctgattgggtgccacagaaagtcagtgtactggcatgtcattggcatgggcaccaccccagaggtgcactccatcttcctggagggccacaccttcctggtgaggaaccacagacaggccagcctggagatcagcccaatcaccttcctcacagcccagaccctcctcatggacctgggccagtttctcctgttctgccacatctcctcccaccagcatgatggcatggaggcctatgtgaaggtggacagctgccctgaggagccccagctcaggatgaagaacaatgaggaggcagaggactatgatgatgatctgacagactctgagatggatgtggtgagatttgatgatgacaacagcccctccttcatccagatcaggtctgtggccaagaagcaccctaagacctgggtgcactacattgcagctgaggaggaggactgggactatgcccccctggtcctggcccctgatgataggtcctacaagtcccagtacctgaacaatggcccccagaggatagggagaaagtacaagaaggtgaggttcatggcctacactgatgagaccttcaagactagggaagccatccagcatgagtctgggatcctgggccccctcctctatggggaggtgggggacaccctgctgatcatcttcaagaaccaggccagcaggccctacaacatttacccccatgggatcacagatgtgagacccctgtacagcaggagactgccaaagggggtgaagcacctgaaggacttccccatcctgccaggggagatcttcaagtacaagtggactgtgacagtggaggatgggcccaccaaatctgaccctagatgcctgaccagatactacagcagctttgtgaacatggagagggacctggcctctggactgattggccctctgctgatctgctacaaggagagtgtggaccagaggggaaaccagatcatgtctgacaagaggaatgtgatcctgttctcagtgtttgatgagaacagatcctggtacctcactgagaacatccagaggttcctgcccaacccagcaggggtgcagctggaggacccagagttccaggcctccaacatcatgcactccatcaatggctatgtctttgactccctgcagctgtcagtgtgcctgcatgaggtggcctactggtacatcctctccattggagcccagactgacttcctgtcagtcttcttcagtggctacaccttcaagcacaagatggtctatgaggacactctgaccctgttccccttctctggggagactgtgttcatgtccatggagaaccctggactgtggatcctgggctgccacaacagtgacttcaggaacaggggcatgactgccctgctgaaggtctccagctgtgacaagaacactggggactactatgaggactcctatgaggacatctctgcctacctgctgtccaagaacaatgccattgagcccaggtccttctcccagaacagcagacacccctccaccaggcagaagcagttcaatgcaaccaccatccctgaaaataccaccctgcagagtgaccaggaggagattgactatgatgacaccatctctgtggagatgaagaaggaggactttgacatctatgatgaggatgagaaccagagccctagaagcttccagaagaagaccagacactacttcattgctgcagtggaaagactgtgggactatgggatgagctcctccccccatgtgctgaggaacagggcccagtctggctctgtgccccagttcaagaaggtggtgttccaggagttcactgatggctccttcacccagcccctgtacaggggagagctgaatgagcacctgggcctgctgggcccctacatcagggctgaggtggaggacaatatcatggtgaccttcagaaaccaggcctccagaccttactccttctacagcagcctgatctcctatgaggaggaccagagacagggggctgagcccaggaagaactttgtgaagcccaatgagaccaagacctacttctggaaggtgcagcaccacatggcccccaccaaggatgagtttgactgcaaggcctgggcctacttctctgatgtggacctggagaaggatgtgcactctggcctgattggccccctgctggtgtgccacaccaacaccctgaaccctgcccatggcaggcaggtgactgtgcaggagtttgccctgttcttcaccatctttgatgagaccaagagctggtacttcactgagaacatggagaggaactgcagggccccctgcaacatccagatggaggaccccaccttcaaggagaactacaggttccatgccatcaatggctacatcatggacaccctgcctggcctggtgatggcccaggaccagaggatcaggtggtacctgctgagcatggggagcaatgagaacatccacagcatccacttctctggccatgtgttcacagtgaggaagaaggaggagtacaagatggccctgtacaacctgtaccctggggtgtttgagacagtggagatgctgccctccaaggctggaatctggagggtggagtgcctgattggggagcacctgcatgctggcatgagcaccctgttcctggtgtacagcaacaagtgccagacccccctgggcatggcctctggccacatcagagacttccagatcacagcctcaggccagtatggccagtgggcccccaagctggccaggctgcactactctggcagcatcaatgcctggtccaccaaggagcccttcagctggatcaaggtggacctcctggcccccatgatcatccatggcatcaagacccagggggccaggcagaagttcagctccctgtacatctcccagttcatcatcatgtactccctggatggcaagaagtggcagacctacagaggcaacagcacaggcaccctgatggtgttctttggcaatgtggacagctctgggatcaagcacaacatcttcaacccccccatcattgccaggtacatcagactgcaccccacccactactccatcaggtccaccctgagaatggagctgatgggctgtgacctgaacagctgcagcatgcccctgggcatggagagcaaggccatctctgatgcccagatcacagccagcagctacttcaccaacatgtttgccacctggtcccccagcaaggccaggctgcacctgcagggcaggagcaatgcctggaggccccaggtgaacaaccccaaggagtggctgcaggtggacttccagaagaccatgaaggtgacaggggtgaccacccagggggtgaagtccctgctgaccagcatgtatgtgaaggagttcctgatcagcagctcccaggatggccaccagtggaccctgttcttccagaatggcaaggtgaaggtgttccagggcaaccaggacagcttcacccctgtggtgaactccctggacccccccctgctgaccagatacctgaggatccacccccagtcctgggtgcaccagattgccctgagaatggaggtgctgggctgtgaggcccaggacctgtactga

SEQ ID NO: 169 - DNA, 4383 bp, Artificial Sequence
  Description of Artificial Sequence: Synthetic polynucleotide
atgcccctgctgctgctgctgcccctgctgtgggctggggccctggcagccaccaggagatactacctgggggctgtggagctgtcctgggactacatgcagtcagacctgggggagctgccagttgatgccaggttcccccccagagtccccaagtccttccccttcaacacctcagtggtgtacaaaaagaccctgtttgtggagttcacagaccacctgttcaacatagccaagcccaggcccccctggatgggcctgctgggccccaccatccaggcagaggtttatgacacagtggtcatcaccctgaagaacatggcctcccaccctgtgtccctccatgctgtgggggtgagctactggaaggccagtgagggggcagaatatgatgaccagaccagccagagggagaaggaggatgacaaggtgttcccagggggcagccacacctatgtgtggcaggtcctgaaggagaatggccccatggcctctgaccccctctgcctcacctactcctacctgtcccatgtggacctggtgaaggacctcaactctggcctgattggagccctcctggtgtgcagggaggggagcctggccaaggaaaagacccagaccctgcacaagtttatcctgctctttgcagtctttgatgaggggaagtcctggcacagtgagaccaagaactccctgatgcaggacagagatgctgcctcagccagggcctggcccaagatgcacacagtgaatgggtatgtcaacaggagcctgccaggcctgattgggtgccacagaaagtcagtgtactggcatgtcattggcatgggcaccaccccagaggtgcactccatcttcctggagggccacaccttcctggtgaggaaccacagacaggccagcctggagatcagcccaatcaccttcctcacagcccagaccctcctcatggacctgggccagtttctcctgttctgccacatctcctcccaccagcatgatggcatggaggcctatgtgaaggtggacagctgccctgaggagccccagctcaggatgaagaacaatgaggaggcagaggactatgatgatgatctgacagactctgagatggatgtggtgagatttgatgatgacaacagcccctccttcatccagatcaggtctgtggccaagaagcaccctaagacctgggtgcactacattgcagctgaggaggaggactgggactatgcccccctggtcctggcccctgatgataggtcctacaagtcccagtacctgaacaatggcccccagaggatagggagaaagtacaagaaggtgaggttcatggcctacactgatgagaccttcaagactagggaagccatccagcatgagtctgggatcctgggccccctcctctatggggaggtgggggacaccctgctgatcatcttcaagaaccaggccagcaggccctacaacatttacccccatgggatcacagatgtgagacccctgtacagcaggagactgccaaagggggtgaagcacctgaaggacttccccatcctgccaggggagatcttcaagtacaagtggactgtgacagtggaggatgggcccaccaaatctgaccctagatgcctgaccagatactacagcagctttgtgaacatggagagggacctggcctctggactgattggccctctgctgatctgctacaaggagagtgtggaccagaggggaaaccagatcatgtctgacaagaggaatgtgatcctgttctcagtgtttgatgagaacagatcctggtacctcactgagaacatccagaggttcctgcccaacccagcaggggtgcagctggaggacccagagttccaggcctccaacatcatgcactccatcaatggctatgtctttgactccctgcagctgtcagtgtgcctgcatgaggtggcctactggtacatcctctccattggagcccagactgacttcctgtcagtcttcttcagtggctacaccttcaagcacaagatggtctatgaggacactctgaccctgttccccttctctggggagactgtgttcatgtccatggagaaccctggactgtggatcctgggctgccacaacagtgacttcaggaacaggggcatgactgccctgctgaaggtctccagctgtgacaagaacactggggactactatgaggactcctatgaggacatctctgcctacctgctgtccaagaacaatgccattgagcccaggtccttctcccagaacagcagacacccctccaccaggcagaagcagttcaatgcaaccaccatccctgaaaataccaccctgcagagtgaccaggaggagattgactatgatgacaccatctctgtggagatgaagaaggaggactttgacatctatgatgaggatgagaaccagagccctagaagcttccagaagaagaccagacactacttcattgctgcagtggaaagactgtgggactatgggatgagctcctccccccatgtgctgaggaacagggcccagtctggctctgtgccccagttcaagaaggtggtgttccaggagttcactgatggctccttcacccagcccctgtacaggggagagctgaatgagcacctgggcctgctgggcccctacatcagggctgaggtggaggacaatatcatggtgaccttcagaaaccaggcctccagaccttactccttctacagcagcctgatctcctatgaggaggaccagagacagggggctgagcccaggaagaactttgtgaagcccaatgagaccaagacctacttctggaaggtgcagcaccacatggcccccaccaaggatgagtttgactgcaaggcctgggcctacttctctgatgtggacctggagaaggatgtgcactctggcctgattggccccctgctggtgtgccacaccaacaccctgaaccctgcccatggcaggcaggtgactgtgcaggagtttgccctgttcttcaccatctttgatgagaccaagagctggtacttcactgagaacatggagaggaactgcagggccccctgcaacatccagatggaggaccccaccttcaaggagaactacaggttccatgccatcaatggctacatcatggacaccctgcctggcctggtgatggcccaggaccagaggatcaggtggtacctgctgagcatggggagcaatgagaacatccacagcatccacttctctggccatgtgttcacagtgaggaagaaggaggagtacaagatggccctgtacaacctgtaccctggggtgtttgagacagtggagatgctgccctccaaggctggaatctggagggtggagtgcctgattggggagcacctgcatgctggcatgagcaccctgttcctggtgtacagcaacaagtgccagacccccctgggcatggcctctggccacatcagagacttccagatcacagcctcaggccagtatggccagtgggcccccaagctggccaggctgcactactctggcagcatcaatgcctggtccaccaaggagcccttcagctggatcaaggtggacctcctggcccccatgatcatccatggcatcaagacccagggggccaggcagaagttcagctccctgtacatctcccagttcatcatcatgtactccctggatggcaagaagtggcagacctacagaggcaacagcacaggcaccctgatggtgttctttggcaatgtggacagctctgggatcaagcacaacatcttcaacccccccatcattgccaggtacatcagactgcaccccacccactactccatcaggtccaccctgagaatggagctgatgggctgtgacctgaacagctgcagcatgcccctgggcatggagagcaaggccatctctgatgcccagatcacagccagcagctacttcaccaacatgtttgccacctggtcccccagcaaggccaggctgcacctgcagggcaggagcaatgcctggaggccccaggtgaacaaccccaaggagtggctgcaggtggacttccagaagaccatgaaggtgacaggggtgaccacccagggggtgaagtccctgctgaccagcatgtatgtgaaggagttcctgatcagcagctcccaggatggccaccagtggaccctgttcttccagaatggcaaggtgaaggtgttccagggcaaccaggacagcttcacccctgtggtgaactccctggacccccccctgctgaccagatacctgaggatccacccccagtcctgggtgcaccagattgccctgagaatggaggtgctgggctgtgaggcccaggacctgtactga

SEQ ID NO: 170 - DNA, 4383 bp, Artificial Sequence
  Description of Artificial Sequence: Synthetic polynucleotide
atgaaatgggtaacttttatctctctattattctcaagtgcttactctgccaccaggagatactacctgggggctgtggagctgtcctgggactacatgcagtcagacctgggggagctgccagttgatgccaggttcccccccagagtccccaagtccttccccttcaacacctcagtggtgtacaaaaagaccctgtttgtggagttcacagaccacctgttcaacatagccaagcccaggcccccctggatgggcctgctgggccccaccatccaggcagaggtttatgacacagtggtcatcaccctgaagaacatggcctcccaccctgtgtccctccatgctgtgggggtgagctactggaaggccagtgagggggcagaatatgatgaccagaccagccagagggagaaggaggatgacaaggtgttcccagggggcagccacacctatgtgtggcaggtcctgaaggagaatggccccatggcctctgaccccctctgcctcacctactcctacctgtcccatgtggacctggtgaaggacctcaactctggcctgattggagccctcctggtgtgcagggaggggagcctggccaaggaaaagacccagaccctgcacaagtttatcctgctctttgcagtctttgatgaggggaagtcctggcacagtgagaccaagaactccctgatgcaggacagagatgctgcctcagccagggcctggcccaagatgcacacagtgaatgggtatgtcaacaggagcctgccaggcctgattgggtgccacagaaagtcagtgtactggcatgtcattggcatgggcaccaccccagaggtgcactccatcttcctggagggccacaccttcctggtgaggaaccacagacaggccagcctggagatcagcccaatcaccttcctcacagcccagaccctcctcatggacctgggccagtttctcctgttctgccacatctcctcccaccagcatgatggcatggaggcctatgtgaaggtggacagctgccctgaggagccccagctcaggatgaagaacaatgaggaggcagaggactatgatgatgatctgacagactctgagatggatgtggtgagatttgatgatgacaacagcccctccttcatccagatcaggtctgtggccaagaagcaccctaagacctgggtgcactacattgcagctgaggaggaggactgggactatgcccccctggtcctggcccctgatgataggtcctacaagtcccagtacctgaacaatggcccccagaggatagggagaaagtacaagaaggtgaggttcatggcctacactgatgagaccttcaagactagggaagccatccagcatgagtctgggatcctgggccccctcctctatggggaggtgggggacaccctgctgatcatcttcaagaaccaggccagcaggccctacaacatttacccccatgggatcacagatgtgagacccctgtacagcaggagactgccaaagggggtgaagcacctgaaggacttccccatcctgccaggggagatcttcaagtacaagtggactgtgacagtggaggatgggcccaccaaatctgaccctagatgcctgaccagatactacagcagctttgtgaacatggagagggacctggcctctggactgattggccctctgctgatctgctacaaggagagtgtggaccagaggggaaaccagatcatgtctgacaagaggaatgtgatcctgttctcagtgtttgatgagaacagatcctggtacctcactgagaacatccagaggttcctgcccaacccagcaggggtgcagctggaggacccagagttccaggcctccaacatcatgcactccatcaatggctatgtctttgactccctgcagctgtcagtgtgcctgcatgaggtggcctactggtacatcctctccattggagcccagactgacttcctgtcagtcttcttcagtggctacaccttcaagcacaagatggtctatgaggacactctgaccctgttccccttctctggggagactgtgttcatgtccatggagaaccctggactgtggatcctgggctgccacaacagtgacttcaggaacaggggcatgactgccctgctgaaggtctccagctgtgacaagaacactggggactactatgaggactcctatgaggacatctctgcctacctgctgtccaagaacaatgccattgagcccaggtccttctcccagaacagcagacacccctccaccaggcagaagcagttcaatgcaaccaccatccctgaaaataccaccctgcagagtgaccaggaggagattgactatgatgacaccatctctgtggagatgaagaaggaggactttgacatctatgatgaggatgagaaccagagccctagaagcttccagaagaagaccagacactacttcattgctgcagtggaaagactgtgggactatgggatgagctcctccccccatgtgctgaggaacagggcccagtctggctctgtgccccagttcaagaaggtggtgttccaggagttcactgatggctccttcacccagcccctgtacaggggagagctgaatgagcacctgggcctgctgggcccctacatcagggctgaggtggaggacaatatcatggtgaccttcagaaaccaggcctccagaccttactccttctacagcagcctgatctcctatgaggaggaccagagacagggggctgagcccaggaagaactttgtgaagcccaatgagaccaagacctacttctggaaggtgcagcaccacatggcccccaccaaggatgagtttgactgcaaggcctgggcctacttctctgatgtggacctggagaaggatgtgcactctggcctgattggccccctgctggtgtgccacaccaacaccctgaaccctgcccatggcaggcaggtgactgtgcaggagtttgccctgttcttcaccatctttgatgagaccaagagctggtacttcactgagaacatggagaggaactgcagggccccctgcaacatccagatggaggaccccaccttcaaggagaactacaggttccatgccatcaatggctacatcatggacaccctgcctggcctggtgatggcccaggaccagaggatcaggtggtacctgctgagcatggggagcaatgagaacatccacagcatccacttctctggccatgtgttcacagtgaggaagaaggaggagtacaagatggccctgtacaacctgtaccctggggtgtttgagacagtggagatgctgccctccaaggctggaatctggagggtggagtgcctgattggggagcacctgcatgctggcatgagcaccctgttcctggtgtacagcaacaagtgccagacccccctgggcatggcctctggccacatcagagacttccagatcacagcctcaggccagtatggccagtgggcccccaagctggccaggctgcactactctggcagcatcaatgcctggtccaccaaggagcccttcagctggatcaaggtggacctcctggcccccatgatcatccatggcatcaagacccagggggccaggcagaagttcagctccctgtacatctcccagttcatcatcatgtactccctggatggcaagaagtggcagacctacagaggcaacagcacaggcaccctgatggtgttctttggcaatgtggacagctctgggatcaagcacaacatcttcaacccccccatcattgccaggtacatcagactgcaccccacccactactccatcaggtccaccctgagaatggagctgatgggctgtgacctgaacagctgcagcatgcccctgggcatggagagcaaggccatctctgatgcccagatcacagccagcagctacttcaccaacatgtttgccacctggtcccccagcaaggccaggctgcacctgcagggcaggagcaatgcctggaggccccaggtgaacaaccccaaggagtggctgcaggtggacttccagaagaccatgaaggtgacaggggtgaccacccagggggtgaagtccctgctgaccagcatgtatgtgaaggagttcctgatcagcagctcccaggatggccaccagtggaccctgttcttccagaatggcaaggtgaaggtgttccagggcaaccaggacagcttcacccctgtggtgaactccctggacccccccctgctgaccagatacctgaggatccacccccagtcctgggtgcaccagattgccctgagaatggaggtgctgggctgtgaggcccaggacctgtactga

SEQ ID NO: 171 - DNA, 4383 bp, Artificial Sequence
  Description of Artificial Sequence: Synthetic polynucleotide
atgaagtgggtgaccttcatcagcctgctgttcagctctgcctacagtgccaccaggagatactacctgggggctgtggagctgtcctgggactacatgcagtcagacctgggggagctgccagttgatgccaggttcccccccagagtccccaagtccttccccttcaacacctcagtggtgtacaaaaagaccctgtttgtggagttcacagaccacctgttcaacatagccaagcccaggcccccctggatgggcctgctgggccccaccatccaggcagaggtttatgacacagtggtcatcaccctgaagaacatggcctcccaccctgtgtccctccatgctgtgggggtgagctactggaaggccagtgagggggcagaatatgatgaccagaccagccagagggagaaggaggatgacaaggtgttcccagggggcagccacacctatgtgtggcaggtcctgaaggagaatggccccatggcctctgaccccctctgcctcacctactcctacctgtcccatgtggacctggtgaaggacctcaactctggcctgattggagccctcctggtgtgcagggaggggagcctggccaaggaaaagacccagaccctgcacaagtttatcctgctctttgcagtctttgatgaggggaagtcctggcacagtgagaccaagaactccctgatgcaggacagagatgctgcctcagccagggcctggcccaagatgcacacagtgaatgggtatgtcaacaggagcctgccaggcctgattgggtgccacagaaagtcagtgtactggcatgtcattggcatgggcaccaccccagaggtgcactccatcttcctggagggccacaccttcctggtgaggaaccacagacaggccagcctggagatcagcccaatcaccttcctcacagcccagaccctcctcatggacctgggccagtttctcctgttctgccacatctcctcccaccagcatgatggcatggaggcctatgtgaaggtggacagctgccctgaggagccccagctcaggatgaagaacaatgaggaggcagaggactatgatgatgatctgacagactctgagatggatgtggtgagatttgatgatgacaacagcccctccttcatccagatcaggtctgtggccaagaagcaccctaagacctgggtgcactacattgcagctgaggaggaggactgggactatgcccccctggtcctggcccctgatgataggtcctacaagtcccagtacctgaacaatggcccccagaggatagggagaaagtacaagaaggtgaggttcatggcctacactgatgagaccttcaagactagggaagccatccagcatgagtctgggatcctgggccccctcctctatggggaggtgggggacaccctgctgatcatcttcaagaaccaggccagcaggccctacaacatttacccccatgggatcacagatgtgagacccctgtacagcaggagactgccaaagggggtgaagcacctgaaggacttccccatcctgccaggggagatcttcaagtacaagtggactgtgacagtggaggatgggcccaccaaatctgaccctagatgcctgaccagatactacagcagctttgtgaacatggagagggacctggcctctggactgattggccctctgctgatctgctacaaggagagtgtggaccagaggggaaaccagatcatgtctgacaagaggaatgtgatcctgttctcagtgtttgatgagaacagatcctggtacctcactgagaacatccagaggttcctgcccaacccagcaggggtgcagctggaggacccagagttccaggcctccaacatcatgcactccatcaatggctatgtctttgactccctgcagctgtcagtgtgcctgcatgaggtggcctactggtacatcctctccattggagcccagactgacttcctgtcagtcttcttcagtggctacaccttcaagcacaagatggtctatgaggacactctgaccctgttccccttctctggggagactgtgttcatgtccatggagaaccctggactgtggatcctgggctgccacaacagtgacttcaggaacaggggcatgactgccctgctgaaggtctccagctgtgacaagaacactggggactactatgaggactcctatgaggacatctctgcctacctgctgtccaagaacaatgccattgagcccaggtccttctcccagaacagcagacacccctccaccaggcagaagcagttcaatgcaaccaccatccctgaaaataccaccctgcagagtgaccaggaggagattgactatgatgacaccatctctgtggagatgaagaaggaggactttgacatctatgatgaggatgagaaccagagccctagaagcttccagaagaagaccagacactacttcattgctgcagtggaaagactgtgggactatgggatgagctcctccccccatgtgctgaggaacagggcccagtctggctctgtgccccagttcaagaaggtggtgttccaggagttcactgatggctccttcacccagcccctgtacaggggagagctgaatgagcacctgggcctgctgggcccctacatcagggctgaggtggaggacaatatcatggtgaccttcagaaaccaggcctccagaccttactccttctacagcagcctgatctcctatgaggaggaccagagacagggggctgagcccaggaagaactttgtgaagcccaatgagaccaagacctacttctggaaggtgcagcaccacatggcccccaccaaggatgagtttgactgcaaggcctgggcctacttctctgatgtggacctggagaaggatgtgcactctggcctgattggccccctgctggtgtgccacaccaacaccctgaaccctgcccatggcaggcaggtgactgtgcaggagtttgccctgttcttcaccatctttgatgagaccaagagctggtacttcactgagaacatggagaggaactgcagggccccctgcaacatccagatggaggaccccaccttcaaggagaactacaggttccatgccatcaatggctacatcatggacaccctgcctggcctggtgatggcccaggaccagaggatcaggtggtacctgctgagcatggggagcaatgagaacatccacagcatccacttctctggccatgtgttcacagtgaggaagaaggaggagtacaagatggccctgtacaacctgtaccctggggtgtttgagacagtggagatgctgccctccaaggctggaatctggagggtggagtgcctgattggggagcacctgcatgctggcatgagcaccctgttcctggtgtacagcaacaagtgccagacccccctgggcatggcctctggccacatcagagacttccagatcacagcctcaggccagtatggccagtgggcccccaagctggccaggctgcactactctggcagcatcaatgcctggtccaccaaggagcccttcagctggatcaaggtggacctcctggcccccatgatcatccatggcatcaagacccagggggccaggcagaagttcagctccctgtacatctcccagttcatcatcatgtactccctggatggcaagaagtggcagacctacagaggcaacagcacaggcaccctgatggtgttctttggcaatgtggacagctctgggatcaagcacaacatcttcaacccccccatcattgccaggtacatcagactgcaccccacccactactccatcaggtccaccctgagaatggagctgatgggctgtgacctgaacagctgcagcatgcccctgggcatggagagcaaggccatctctgatgcccagatcacagccagcagctacttcaccaacatgtttgccacctggtcccccagcaaggccaggctgcacctgcagggcaggagcaatgcctggaggccccaggtgaacaaccccaaggagtggctgcaggtggacttccagaagaccatgaaggtgacaggggtgaccacccagggggtgaagtccctgctgaccagcatgtatgtgaaggagttcctgatcagcagctcccaggatggccaccagtggaccctgttcttccagaatggcaaggtgaaggtgttccagggcaaccaggacagcttcacccctgtggtgaactccctggacccccccctgctgaccagatacctgaggatccacccccagtcctgggtgcaccagattgccctgagaatggaggtgctgggctgtgaggcccaggacctgtactga

SEQ ID NO: 172 - DNA, 4383 bp, Artificial Sequence
  Description of Artificial Sequence: Synthetic polynucleotide
atgccactattactcctcttgcctctactgtgggctggtgcactggcagccaccaggagatactacctgggggctgtggagctgtcctgggactacatgcagtcagacctgggggagctgccagttgatgccaggttcccccccagagtccccaagtccttccccttcaacacctcagtggtgtacaaaaagaccctgtttgtggagttcacagaccacctgttcaacatagccaagcccaggcccccctggatgggcctgctgggccccaccatccaggcagaggtttatgacacagtggtcatcaccctgaagaacatggcctcccaccctgtgtccctccatgctgtgggggtgagctactggaaggccagtgagggggcagaatatgatgaccagaccagccagagggagaaggaggatgacaaggtgttcccagggggcagccacacctatgtgtggcaggtcctgaaggagaatggccccatggcctctgaccccctctgcctcacctactcctacctgtcccatgtggacctggtgaaggacctcaactctggcctgattggagccctcctggtgtgcagggaggggagcctggccaaggaaaagacccagaccctgcacaagtttatcctgctctttgcagtctttgatgaggggaagtcctggcacagtgagaccaagaactccctgatgcaggacagagatgctgcctcagccagggcctggcccaagatgcacacagtgaatgggtatgtcaacaggagcctgccaggcctgattgggtgccacagaaagtcagtgtactggcatgtcattggcatgggcaccaccccagaggtgcactccatcttcctggagggccacaccttcctggtgaggaaccacagacaggccagcctggagatcagcccaatcaccttcctcacagcccagaccctcctcatggacctgggccagtttctcctgttctgccacatctcctcccaccagcatgatggcatggaggcctatgtgaaggtggacagctgccctgaggagccccagctcaggatgaagaacaatgaggaggcagaggactatgatgatgatctgacagactctgagatggatgtggtgagatttgatgatgacaacagcccctccttcatccagatcaggtctgtggccaagaagcaccctaagacctgggtgcactacattgcagctgaggaggaggactgggactatgcccccctggtcctggcccctgatgataggtcctacaagtcccagtacctgaacaatggcccccagaggatagggagaaagtacaagaaggtgaggttcatggcctacactgatgagaccttcaagactagggaagccatccagcatgagtctgggatcctgggccccctcctctatggggaggtgggggacaccctgctgatcatcttcaagaaccaggccagcaggccctacaacatttacccccatgggatcacagatgtgagacccctgtacagcaggagactgccaaagggggtgaagcacctgaaggacttccccatcctgccaggggagatcttcaagtacaagtggactgtgacagtggaggatgggcccaccaaatctgaccctagatgcctgaccagatactacagcagctttgtgaacatggagagggacctggcctctggactgattggccctctgctgatctgctacaaggagagtgtggaccagaggggaaaccagatcatgtctgacaagaggaatgtgatcctgttctcagtgtttgatgagaacagatcctggtacctcactgagaacatccagaggttcctgcccaacccagcaggggtgcagctggaggacccagagttccaggcctccaacatcatgcactccatcaatggctatgtctttgactccctgcagctgtcagtgtgcctgcatgaggtggcctactggtacatcctctccattggagcccagactgacttcctgtcagtcttcttcagtggctacaccttcaagcacaagatggtctatgaggacactctgaccctgttccccttctctggggagactgtgttcatgtccatggagaaccctggactgtggatcctgggctgccacaacagtgacttcaggaacaggggcatgactgccctgctgaaggtctccagctgtgacaagaacactggggactactatgaggactcctatgaggacatctctgcctacctgctgtccaagaacaatgccattgagcccaggtccttctcccagaacagcagacacccctccaccaggcagaagcagttcaatgcaaccaccatccctgaaaataccaccctgcagagtgaccaggaggagattgactatgatgacaccatctctgtggagatgaagaaggaggactttgacatctatgatgaggatgagaaccagagccctagaagcttccagaagaagaccagacactacttcattgctgcagtggaaagactgtgggactatgggatgagctcctccccccatgtgctgaggaacagggcccagtctggctctgtgccccagttcaagaaggtggtgttccaggagttcactgatggctccttcacccagcccctgtacaggggagagctgaatgagcacctgggcctgctgggcccctacatcagggctgaggtggaggacaatatcatggtgaccttcagaaaccaggcctccagaccttactccttctacagcagcctgatctcctatgaggaggaccagagacagggggctgagcccaggaagaactttgtgaagcccaatgagaccaagacctacttctggaaggtgcagcaccacatggcccccaccaaggatgagtttgactgcaaggcctgggcctacttctctgatgtggacctggagaaggatgtgcactctggcctgattggccccctgctggtgtgccacaccaacaccctgaaccctgcccatggcaggcaggtgactgtgcaggagtttgccctgttcttcaccatctttgatgagaccaagagctggtacttcactgagaacatggagaggaactgcagggccccctgcaacatccagatggaggaccccaccttcaaggagaactacaggttccatgccatcaatggctacatcatggacaccctgcctggcctggtgatggcccaggaccagaggatcaggtggtacctgctgagcatggggagcaatgagaacatccacagcatccacttctctggccatgtgttcacagtgaggaagaaggaggagtacaagatggccctgtacaacctgtaccctggggtgtttgagacagtggagatgctgccctccaaggctggaatctggagggtggagtgcctgattggggagcacctgcatgctggcatgagcaccctgttcctggtgtacagcaacaagtgccagacccccctgggcatggcctctggccacatcagagacttccagatcacagcctcaggccagtatggccagtgggcccccaagctggccaggctgcactactctggcagcatcaatgcctggtccaccaaggagcccttcagctggatcaaggtggacctcctggcccccatgatcatccatggcatcaagacccagggggccaggcagaagttcagctccctgtacatctcccagttcatcatcatgtactccctggatggcaagaagtggcagacctacagaggcaacagcacaggcaccctgatggtgttctttggcaatgtggacagctctgggatcaagcacaacatcttcaacccccccatcattgccaggtacatcagactgcaccccacccactactccatcaggtccaccctgagaatggagctgatgggctgtgacctgaacagctgcagcatgcccctgggcatggagagcaaggccatctctgatgcccagatcacagccagcagctacttcaccaacatgtttgccacctggtcccccagcaaggccaggctgcacctgcagggcaggagcaatgcctggaggccccaggtgaacaaccccaaggagtggctgcaggtggacttccagaagaccatgaaggtgacaggggtgaccacccagggggtgaagtccctgctgaccagcatgtatgtgaaggagttcctgatcagcagctcccaggatggccaccagtggaccctgttcttccagaatggcaaggtgaaggtgttccagggcaaccaggacagcttcacccctgtggtgaactccctggacccccccctgctgaccagatacctgaggatccacccccagtcctgggtgcaccagattgccctgagaatggaggtgctgggctgtgaggcccaggacctgtactga

SEQ ID NO: 173 - DNA, 4404 bp, Artificial Sequence
  Description of Artificial Sequence: Synthetic polynucleotide
atgccctcatcagtgtcttggggaatcctgctgctggctggactgtgctgtctggtgcctgtctctctggccaccaggagatactacctgggggctgtggagctgagctgggactacatgcagtctgacctgggggagctgcctgtggatgccaggttcccccccagagtgcccaagagcttccccttcaacacctctgtggtgtacaagaagaccctgtttgtggagttcactgaccacctgttcaacattgccaagcccaggcccccctggatgggcctgctgggccccaccatccaggctgaggtgtatgacactgtggtgatcaccctgaagaacatggccagccaccctgtgagcctgcatgctgtgggggtgagctactggaaggcctctgagggggctgagtatgatgaccagaccagccagagggagaaggaggatgacaaggtgttccctgggggcagccacacctatgtgtggcaggtgctgaaggagaatggccccatggcctctgaccccctgtgcctgacctacagctacctgagccatgtggacctggtgaaggacctgaactctggcctgattggggccctgctggtgtgcagggagggcagcctggccaaggagaagacccagaccctgcacaagttcatcctgctgtttgctgtgtttgatgagggcaagagctggcactctgaaaccaagaacagcctgatgcaggacagggatgctgcctctgccagggcctggcccaagatgcacactgtgaatggctatgtgaacaggagcctgcctggcctgattggctgccacaggaagtctgtgtactggcatgtgattggcatgggcaccacccctgaggtgcacagcatcttcctggagggccacaccttcctggtcaggaaccacaggcaggccagcctggagatcagccccatcaccttcctgactgcccagaccctgctgatggacctgggccagttcctgctgttctgccacatcagcagccaccagcatgatggcatggaggcctatgtgaaggtggacagctgccctgaggagccccagctgaggatgaagaacaatgaggaggctgaggactatgatgatgacctgactgactctgagatggatgtggtgaggtttgatgatgacaacagccccagcttcatccagatcaggtctgtggccaagaagcaccccaagacctgggtgcactacattgctgctgaggaggaggactgggactatgcccccctggtgctggcccctgatgacaggagctacaagagccagtacctgaacaatggcccccagaggattggcaggaagtacaagaaggtcaggttcatggcctacactgatgaaaccttcaagaccagggaggccatccagcatgagtctggcatcctgggccccctgctgtatggggaggtgggggacaccctgctgatcatcttcaagaaccaggccagcaggccctacaacatctacccccatggcatcactgatgtgaggcccctgtacagcaggaggctgcccaagggggtgaagcacctgaaggacttccccatcctgcctggggagatcttcaagtacaagtggactgtgactgtggaggatggccccaccaagtctgaccccaggtgcctgaccagatactacagcagctttgtgaacatggagagggacctggcctctggcctgattggccccctgctgatctgctacaaggagtctgtggaccagaggggcaaccagatcatgtctgacaagaggaatgtgatcctgttctctgtgtttgatgagaacaggagctggtacctgactgagaacatccagaggttcctgcccaaccctgctggggtgcagctggaggaccctgagttccaggccagcaacatcatgcacagcatcaatggctatgtgtttgacagcctgcagctgtctgtgtgcctgcatgaggtggcctactggtacatcctgagcattggggcccagactgacttcctgtctgtgttcttctctggctacaccttcaagcacaagatggtgtatgaggacaccctgaccctgttccccttctctggggagactgtgttcatgagcatggagaaccctggcctgtggattctgggctgccacaactctgacttcaggaacaggggcatgactgccctgctgaaagtctccagctgtgacaagaacactggggactactatgaggacagctatgaggacatctctgcctacctgctgagcaagaacaatgccattgagcccaggagcttcagccagaatagcaggcaccccagcaccaggcagaagcagttcaatgccaccaccatcccagagaataccaccctgcagtctgaccaggaggagattgactatgatgacaccatctctgtggagatgaagaaggaggactttgacatctacgacgaggacgagaaccagagccccaggagcttccagaagaagaccaggcactacttcattgctgctgtggagaggctgtgggactatggcatgagcagcagcccccatgtgctgaggaacagggcccagtctggctctgtgccccagttcaagaaggtggtgttccaggagttcactgatggcagcttcacccagcccctgtacagaggggagctgaatgagcacctgggcctgctgggcccctacatcagggctgaggtggaggacaacatcatggtgaccttcaggaaccaggccagcaggccctacagcttctacagcagcctgatcagctatgaggaggaccagaggcagggggctgagcccaggaagaactttgtgaagcccaatgaaaccaagacctacttctggaaggtgcagcaccacatggcccccaccaaggatgagtttgactgcaaggcctgggcctacttctctgatgtggacctggagaaggatgtgcactctggcctgattggccccctgctggtgtgccacaccaacaccctgaaccctgcccatggcaggcaggtgactgtgcaggagtttgccctgttcttcaccatctttgatgaaaccaagagctggtacttcactgagaacatggagaggaactgcagggccccctgcaacatccagatggaggaccccaccttcaaggagaactacaggttccatgccatcaatggctacatcatggacaccctgcctggcctggtgatggcccaggaccagaggatcaggtggtacctgctgagcatgggcagcaatgagaacatccacagcatccacttctctggccatgtgttcactgtgaggaagaaggaggagtacaagatggccctgtacaacctgtaccctggggtgtttgagactgtggagatgctgcccagcaaggctggcatctggagggtggagtgcctgattggggagcacctgcatgctggcatgagcaccctgttcctggtgtacagcaacaagtgccagacccccctgggcatggcctctggccacatcagggacttccagatcactgcctctggccagtatggccagtgggcccccaagctggccaggctgcactactctggcagcatcaatgcctggagcaccaaggagcccttcagctggatcaaggtggacctgctggcccccatgatcatccatggcatcaagacccagggggccaggcagaagttcagcagcctgtacatcagccagttcatcatcatgtacagcctggatggcaagaagtggcagacctacaggggcaacagcactggcaccctgatggtgttctttggcaatgtggacagctctggcatcaagcacaacatcttcaacccccccatcattgccagatacatcaggctgcaccccacccactacagcatcaggagcaccctgaggatggagctgatgggctgtgacctgaacagctgcagcatgcccctgggcatggagagcaaggccatctctgatgcccagatcactgccagcagctacttcaccaacatgtttgccacctggagccccagcaaggccaggctgcacctgcagggcaggagcaatgcctggaggccccaggtcaacaaccccaaggagtggctgcaggtggacttccagaagaccatgaaggtgactggggtgaccacccagggggtgaagagcctgctgaccagcatgtatgtgaaggagttcctgatcagcagcagccaggatggccaccagtggaccctgttcttccagaatggcaaggtgaaggtgttccagggcaaccaggacagcttcacccctgtggtgaacagcctggacccccccctgctgaccagatacctgaggattcacccccagagctgggtgcaccagattgccctgaggatggaggtgctgggctgtgaggcccaggacctgtactga

SEQ ID NO: 174 - DNA, 4380 bp, Artificial Sequence
  Description of Artificial Sequence: Synthetic polynucleotide
atgaaccttctcctgattcttacttttgtagctgctgcagtagcagccaccaggagatactacctgggggctgtggagctgtcctgggactacatgcagtcagacctgggggagctgccagttgatgccaggttcccccccagagtccccaagtccttccccttcaacacctcagtggtgtacaaaaagaccctgtttgtggagttcacagaccacctgttcaacatagccaagcccaggcccccctggatgggcctgctgggccccaccatccaggcagaggtttatgacacagtggtcatcaccctgaagaacatggcctcccaccctgtgtccctccatgctgtgggggtgagctactggaaggccagtgagggggcagaatatgatgaccagaccagccagagggagaaggaggatgacaaggtgttcccagggggcagccacacctatgtgtggcaggtcctgaaggagaatggccccatggcctctgaccccctctgcctcacctactcctacctgtcccatgtggacctggtgaaggacctcaactctggcctgattggagccctcctggtgtgcagggaggggagcctggccaaggaaaagacccagaccctgcacaagtttatcctgctctttgcagtctttgatgaggggaagtcctggcacagtgagaccaagaactccctgatgcaggacagagatgctgcctcagccagggcctggcccaagatgcacacagtgaatgggtatgtcaacaggagcctgccaggcctgattgggtgccacagaaagtcagtgtactggcatgtcattggcatgggcaccaccccagaggtgcactccatcttcctggagggccacaccttcctggtgaggaaccacagacaggccagcctggagatcagcccaatcaccttcctcacagcccagaccctcctcatggacctgggccagtttctcctgttctgccacatctcctcccaccagcatgatggcatggaggcctatgtgaaggtggacagctgccctgaggagccccagctcaggatgaagaacaatgaggaggcagaggactatgatgatgatctgacagactctgagatggatgtggtgagatttgatgatgacaacagcccctccttcatccagatcaggtctgtggccaagaagcaccctaagacctgggtgcactacattgcagctgaggaggaggactgggactatgcccccctggtcctggcccctgatgataggtcctacaagtcccagtacctgaacaatggcccccagaggatagggagaaagtacaagaaggtgaggttcatggcctacactgatgagaccttcaagactagggaagccatccagcatgagtctgggatcctgggccccctcctctatggggaggtgggggacaccctgctgatcatcttcaagaaccaggccagcaggccctacaacatttacccccatgggatcacagatgtgagacccctgtacagcaggagactgccaaagggggtgaagcacctgaaggacttccccatcctgccaggggagatcttcaagtacaagtggactgtgacagtggaggatgggcccaccaaatctgaccctagatgcctgaccagatactacagcagctttgtgaacatggagagggacctggcctctggactgattggccctctgctgatctgctacaaggagagtgtggaccagaggggaaaccagatcatgtctgacaagaggaatgtgatcctgttctcagtgtttgatgagaacagatcctggtacctcactgagaacatccagaggttcctgcccaacccagcaggggtgcagctggaggacccagagttccaggcctccaacatcatgcactccatcaatggctatgtctttgactccctgcagctgtcagtgtgcctgcatgaggtggcctactggtacatcctctccattggagcccagactgacttcctgtcagtcttcttcagtggctacaccttcaagcacaagatggtctatgaggacactctgaccctgttccccttctctggggagactgtgttcatgtccatggagaaccctggactgtggatcctgggctgccacaacagtgacttcaggaacaggggcatgactgccctgctgaaggtctccagctgtgacaagaacactggggactactatgaggactcctatgaggacatctctgcctacctgctgtccaagaacaatgccattgagcccaggtccttctcccagaacagcagacacccctccaccaggcagaagcagttcaatgcaaccaccatccctgaaaataccaccctgcagagtgaccaggaggagattgactatgatgacaccatctctgtggagatgaagaaggaggactttgacatctatgatgaggatgagaaccagagccctagaagcttccagaagaagaccagacactacttcattgctgcagtggaaagactgtgggactatgggatgagctcctccccccatgtgctgaggaacagggcccagtctggctctgtgccccagttcaagaaggtggtgttccaggagttcactgatggctccttcacccagcccctgtacaggggagagctgaatgagcacctgggcctgctgggcccctacatcagggctgaggtggaggacaatatcatggtgaccttcagaaaccaggcctccagaccttactccttctacagcagcctgatctcctatgaggaggaccagagacagggggctgagcccaggaagaactttgtgaagcccaatgagaccaagacctacttctggaaggtgcagcaccacatggcccccaccaaggatgagtttgactgcaaggcctgggcctacttctctgatgtggacctggagaaggatgtgcactctggcctgattggccccctgctggtgtgccacaccaacaccctgaaccctgcccatggcaggcaggtgactgtgcaggagtttgccctgttcttcaccatctttgatgagaccaagagctggtacttcactgagaacatggagaggaactgcagggccccctgcaacatccagatggaggaccccaccttcaaggagaactacaggttccatgccatcaatggctacatcatggacaccctgcctggcctggtgatggcccaggaccagaggatcaggtggtacctgctgagcatggggagcaatgagaacatccacagcatccacttctctggccatgtgttcacagtgaggaagaaggaggagtacaagatggccctgtacaacctgtaccctggggtgtttgagacagtggagatgctgccctccaaggctggaatctggagggtggagtgcctgattggggagcacctgcatgctggcatgagcaccctgttcctggtgtacagcaacaagtgccagacccccctgggcatggcctctggccacatcagagacttccagatcacagcctcaggccagtatggccagtgggcccccaagctggccaggctgcactactctggcagcatcaatgcctggtccaccaaggagcccttcagctggatcaaggtggacctcctggcccccatgatcatccatggcatcaagacccagggggccaggcagaagttcagctccctgtacatctcccagttcatcatcatgtactccctggatggcaagaagtggcagacctacagaggcaacagcacaggcaccctgatggtgttctttggcaatgtggacagctctgggatcaagcacaacatcttcaacccccccatcattgccaggtacatcagactgcaccccacccactactccatcaggtccaccctgagaatggagctgatgggctgtgacctgaacagctgcagcatgcccctgggcatggagagcaaggccatctctgatgcccagatcacagccagcagctacttcaccaacatgtttgccacctggtcccccagcaaggccaggctgcacctgcagggcaggagcaatgcctggaggccccaggtgaacaaccccaaggagtggctgcaggtggacttccagaagaccatgaaggtgacaggggtgaccacccagggggtgaagtccctgctgaccagcatgtatgtgaaggagttcctgatcagcagctcccaggatggccaccagtggaccctgttcttccagaatggcaaggtgaaggtgttccagggcaaccaggacagcttcacccctgtggtgaactccctggacccccccctgctgaccagatacctgaggatccacccccagtcctgggtgcaccagattgccctgagaatggaggtgctgggctgtgaggcccaggacctgtactga

SEQ ID NO: 175 - DNA, 4404 bp, Artificial Sequence
  Description of Artificial Sequence: Synthetic polynucleotide
atggatgctatgaaaagaggcctctgctgtgtgctgctcctctgtggagctgtgtttgttagccccagtgccaccaggagatactacctgggggctgtggagctgtcctgggactacatgcagtcagacctgggggagctgccagttgatgccaggttcccccccagagtccccaagtccttccccttcaacacctcagtggtgtacaaaaagaccctgtttgtggagttcacagaccacctgttcaacatagccaagcccaggcccccctggatgggcctgctgggccccaccatccaggcagaggtttatgacacagtggtcatcaccctgaagaacatggcctcccaccctgtgtccctccatgctgtgggggtgagctactggaaggccagtgagggggcagaatatgatgaccagaccagccagagggagaaggaggatgacaaggtgttcccagggggcagccacacctatgtgtggcaggtcctgaaggagaatggccccatggcctctgaccccctctgcctcacctactcctacctgtcccatgtggacctggtgaaggacctcaactctggcctgattggagccctcctggtgtgcagggaggggagcctggccaaggaaaagacccagaccctgcacaagtttatcctgctctttgcagtctttgatgaggggaagtcctggcacagtgagaccaagaactccctgatgcaggacagagatgctgcctcagccagggcctggcccaagatgcacacagtgaatgggtatgtcaacaggagcctgccaggcctgattgggtgccacagaaagtcagtgtactggcatgtcattggcatgggcaccaccccagaggtgcactccatcttcctggagggccacaccttcctggtgaggaaccacagacaggccagcctggagatcagcccaatcaccttcctcacagcccagaccctcctcatggacctgggccagtttctcctgttctgccacatctcctcccaccagcatgatggcatggaggcctatgtgaaggtggacagctgccctgaggagccccagctcaggatgaagaacaatgaggaggcagaggactatgatgatgatctgacagactctgagatggatgtggtgagatttgatgatgacaacagcccctccttcatccagatcaggtctgtggccaagaagcaccctaagacctgggtgcactacattgcagctgaggaggaggactgggactatgcccccctggtcctggcccctgatgataggtcctacaagtcccagtacctgaacaatggcccccagaggatagggagaaagtacaagaaggtgaggttcatggcctacactgatgagaccttcaagactagggaagccatccagcatgagtctgggatcctgggccccctcctctatggggaggtgggggacaccctgctgatcatcttcaagaaccaggccagcaggccctacaacatttacccccatgggatcacagatgtgagacccctgtacagcaggagactgccaaagggggtgaagcacctgaaggacttccccatcctgccaggggagatcttcaagtacaagtggactgtgacagtggaggatgggcccaccaaatctgaccctagatgcctgaccagatactacagcagctttgtgaacatggagagggacctggcctctggactgattggccctctgctgatctgctacaaggagagtgtggaccagaggggaaaccagatcatgtctgacaagaggaatgtgatcctgttctcagtgtttgatgagaacagatcctggtacctcactgagaacatccagaggttcctgcccaacccagcaggggtgcagctggaggacccagagttccaggcctccaacatcatgcactccatcaatggctatgtctttgactccctgcagctgtcagtgtgcctgcatgaggtggcctactggtacatcctctccattggagcccagactgacttcctgtcagtcttcttcagtggctacaccttcaagcacaagatggtctatgaggacactctgaccctgttccccttctctggggagactgtgttcatgtccatggagaaccctggactgtggatcctgggctgccacaacagtgacttcaggaacaggggcatgactgccctgctgaaggtctccagctgtgacaagaacactggggactactatgaggactcctatgaggacatctctgcctacctgctgtccaagaacaatgccattgagcccaggtccttctcccagaacagcagacacccctccaccaggcagaagcagttcaatgcaaccaccatccctgaaaataccaccctgcagagtgaccaggaggagattgactatgatgacaccatctctgtggagatgaagaaggaggactttgacatctatgatgaggatgagaaccagagccctagaagcttccagaagaagaccagacactacttcattgctgcagtggaaagactgtgggactatgggatgagctcctccccccatgtgctgaggaacagggcccagtctggctctgtgccccagttcaagaaggtggtgttccaggagttcactgatggctccttcacccagcccctgtacaggggagagctgaatgagcacctgggcctgctgggcccctacatcagggctgaggtggaggacaatatcatggtgaccttcagaaaccaggcctccagaccttactccttctacagcagcctgatctcctatgaggaggaccagagacagggggctgagcccaggaagaactttgtgaagcccaatgagaccaagacctacttctggaaggtgcagcaccacatggcccccaccaaggatgagtttgactgcaaggcctgggcctacttctctgatgtggacctggagaaggatgtgcactctggcctgattggccccctgctggtgtgccacaccaacaccctgaaccctgcccatggcaggcaggtgactgtgcaggagtttgccctgttcttcaccatctttgatgagaccaagagctggtacttcactgagaacatggagaggaactgcagggccccctgcaacatccagatggaggaccccaccttcaaggagaactacaggttccatgccatcaatggctacatcatggacaccctgcctggcctggtgatggcccaggaccagaggatcaggtggtacctgctgagcatggggagcaatgagaacatccacagcatccacttctctggccatgtgttcacagtgaggaagaaggaggagtacaagatggccctgtacaacctgtaccctggggtgtttgagacagtggagatgctgccctccaaggctggaatctggagggtggagtgcctgattggggagcacctgcatgctggcatgagcaccctgttcctggtgtacagcaacaagtgccagacccccctgggcatggcctctggccacatcagagacttccagatcacagcctcaggccagtatggccagtgggcccccaagctggccaggctgcactactctggcagcatcaatgcctggtccaccaaggagcccttcagctggatcaaggtggacctcctggcccccatgatcatccatggcatcaagacccagggggccaggcagaagttcagctccctgtacatctcccagttcatcatcatgtactccctggatggcaagaagtggcagacctacagaggcaacagcacaggcaccctgatggtgttctttggcaatgtggacagctctgggatcaagcacaacatcttcaacccccccatcattgccaggtacatcagactgcaccccacccactactccatcaggtccaccctgagaatggagctgatgggctgtgacctgaacagctgcagcatgcccctgggcatggagagcaaggccatctctgatgcccagatcacagccagcagctacttcaccaacatgtttgccacctggtcccccagcaaggccaggctgcacctgcagggcaggagcaatgcctggaggccccaggtgaacaaccccaaggagtggctgcaggtggacttccagaagaccatgaaggtgacaggggtgaccacccagggggtgaagtccctgctgaccagcatgtatgtgaaggagttcctgatcagcagctcccaggatggccaccagtggaccctgttcttccagaatggcaaggtgaaggtgttccagggcaaccaggacagcttcacccctgtggtgaactccctggacccccccctgctgaccagatacctgaggatccacccccagtcctgggtgcaccagattgccctgagaatggaggtgctgggctgtgaggcccaggacctgtactga

SEQ ID NO: 176 - DNA, 4401 bp, Artificial Sequence
  Description of Artificial Sequence: Synthetic polynucleotide
atgtggtggaggctgtggtggttactactgcttctgctcctgttatggccaatggtctgggctgctgccaccaggagatactacctgggggctgtggagctgtcctgggactacatgcagtcagacctgggggagctgccagttgatgccaggttcccccccagagtccccaagtccttccccttcaacacctcagtggtgtacaaaaagaccctgtttgtggagttcacagaccacctgttcaacatagccaagcccaggcccccctggatgggcctgctgggccccaccatccaggcagaggtttatgacacagtggtcatcaccctgaagaacatggcctcccaccctgtgtccctccatgctgtgggggtgagctactggaaggccagtgagggggcagaatatgatgaccagaccagccagagggagaaggaggatgacaaggtgttcccagggggcagccacacctatgtgtggcaggtcctgaaggagaatggccccatggcctctgaccccctctgcctcacctactcctacctgtcccatgtggacctggtgaaggacctcaactctggcctgattggagccctcctggtgtgcagggaggggagcctggccaaggaaaagacccagaccctgcacaagtttatcctgctctttgcagtctttgatgaggggaagtcctggcacagtgagaccaagaactccctgatgcaggacagagatgctgcctcagccagggcctggcccaagatgcacacagtgaatgggtatgtcaacaggagcctgccaggcctgattgggtgccacagaaagtcagtgtactggcatgtcattggcatgggcaccaccccagaggtgcactccatcttcctggagggccacaccttcctggtgaggaaccacagacaggccagcctggagatcagcccaatcaccttcctcacagcccagaccctcctcatggacctgggccagtttctcctgttctgccacatctcctcccaccagcatgatggcatggaggcctatgtgaaggtggacagctgccctgaggagccccagctcaggatgaagaacaatgaggaggcagaggactatgatgatgatctgacagactctgagatggatgtggtgagatttgatgatgacaacagcccctccttcatccagatcaggtctgtggccaagaagcaccctaagacctgggtgcactacattgcagctgaggaggaggactgggactatgcccccctggtcctggcccctgatgataggtcctacaagtcccagtacctgaacaatggcccccagaggatagggagaaagtacaagaaggtgaggttcatggcctacactgatgagaccttcaagactagggaagccatccagcatgagtctgggatcctgggccccctcctctatggggaggtgggggacaccctgctgatcatcttcaagaaccaggccagcaggccctacaacatttacccccatgggatcacagatgtgagacccctgtacagcaggagactgccaaagggggtgaagcacctgaaggacttccccatcctgccaggggagatcttcaagtacaagtggactgtgacagtggaggatgggcccaccaaatctgaccctagatgcctgaccagatactacagcagctttgtgaacatggagagggacctggcctctggactgattggccctctgctgatctgctacaaggagagtgtggaccagaggggaaaccagatcatgtctgacaagaggaatgtgatcctgttctcagtgtttgatgagaacagatcctggtacctcactgagaacatccagaggttcctgcccaacccagcaggggtgcagctggaggacccagagttccaggcctccaacatcatgcactccatcaatggctatgtctttgactccctgcagctgtcagtgtgcctgcatgaggtggcctactggtacatcctctccattggagcccagactgacttcctgtcagtcttcttcagtggctacaccttcaagcacaagatggtctatgaggacactctgaccctgttccccttctctggggagactgtgttcatgtccatggagaaccctggactgtggatcctgggctgccacaacagtgacttcaggaacaggggcatgactgccctgctgaaggtctccagctgtgacaagaacactggggactactatgaggactcctatgaggacatctctgcctacctgctgtccaagaacaatgccattgagcccaggtccttctcccagaacagcagacacccctccaccaggcagaagcagttcaatgcaaccaccatccctgaaaataccaccctgcagagtgaccaggaggagattgactatgatgacaccatctctgtggagatgaagaaggaggactttgacatctatgatgaggatgagaaccagagccctagaagcttccagaagaagaccagacactacttcattgctgcagtggaaagactgtgggactatgggatgagctcctccccccatgtgctgaggaacagggcccagtctggctctgtgccccagttcaagaaggtggtgttccaggagttcactgatggctccttcacccagcccctgtacaggggagagctgaatgagcacctgggcctgctgggcccctacatcagggctgaggtggaggacaatatcatggtgaccttcagaaaccaggcctccagaccttactccttctacagcagcctgatctcctatgaggaggaccagagacagggggctgagcccaggaagaactttgtgaagcccaatgagaccaagacctacttctggaaggtgcagcaccacatggcccccaccaaggatgagtttgactgcaaggcctgggcctacttctctgatgtggacctggagaaggatgtgcactctggcctgattggccccctgctggtgtgccacaccaacaccctgaaccctgcccatggcaggcaggtgactgtgcaggagtttgccctgttcttcaccatctttgatgagaccaagagctggtacttcactgagaacatggagaggaactgcagggccccctgcaacatccagatggaggaccccaccttcaaggagaactacaggttccatgccatcaatggctacatcatggacaccctgcctggcctggtgatggcccaggaccagaggatcaggtggtacctgctgagcatggggagcaatgagaacatccacagcatccacttctctggccatgtgttcacagtgaggaagaaggaggagtacaagatggccctgtacaacctgtaccctggggtgtttgagacagtggagatgctgccctccaaggctggaatctggagggtggagtgcctgattggggagcacctgcatgctggcatgagcaccctgttcctggtgtacagcaacaagtgccagacccccctgggcatggcctctggccacatcagagacttccagatcacagcctcaggccagtatggccagtgggcccccaagctggccaggctgcactactctggcagcatcaatgcctggtccaccaaggagcccttcagctggatcaaggtggacctcctggcccccatgatcatccatggcatcaagacccagggggccaggcagaagttcagctccctgtacatctcccagttcatcatcatgtactccctggatggcaagaagtggcagacctacagaggcaacagcacaggcaccctgatggtgttctttggcaatgtggacagctctgggatcaagcacaacatcttcaacccccccatcattgccaggtacatcagactgcaccccacccactactccatcaggtccaccctgagaatggagctgatgggctgtgacctgaacagctgcagcatgcccctgggcatggagagcaaggccatctctgatgcccagatcacagccagcagctacttcaccaacatgtttgccacctggtcccccagcaaggccaggctgcacctgcagggcaggagcaatgcctggaggccccaggtgaacaaccccaaggagtggctgcaggtggacttccagaagaccatgaaggtgacaggggtgaccacccagggggtgaagtccctgctgaccagcatgtatgtgaaggagttcctgatcagcagctcccaggatggccaccagtggaccctgttcttccagaatggcaaggtgaaggtgttccagggcaaccaggacagcttcacccctgtggtgaactccctggacccccccctgctgaccagatacctgaggatccacccccagtcctgggtgcaccagattgccctgagaatggaggtgctgggctgtgaggcccaggacctgtactga

SEQ ID NO: 177 - DNA, 4398 bp, Artificial Sequence
  Description of Artificial Sequence: Synthetic polynucleotide
atgtggtggaggctgtggtggttactactgcttctgctcctgttatggccaatggtctgggctgccaccaggagatactacctgggggctgtggagctgtcctgggactacatgcagtcagacctgggggagctgccagttgatgccaggttcccccccagagtccccaagtccttccccttcaacacctcagtggtgtacaaaaagaccctgtttgtggagttcacagaccacctgttcaacatagccaagcccaggcccccctggatgggcctgctgggccccaccatccaggcagaggtttatgacacagtggtcatcaccctgaagaacatggcctcccaccctgtgtccctccatgctgtgggggtgagctactggaaggccagtgagggggcagaatatgatgaccagaccagccagagggagaaggaggatgacaaggtgttcccagggggcagccacacctatgtgtggcaggtcctgaaggagaatggccccatggcctctgaccccctctgcctcacctactcctacctgtcccatgtggacctggtgaaggacctcaactctggcctgattggagccctcctggtgtgcagggaggggagcctggccaaggaaaagacccagaccctgcacaagtttatcctgctctttgcagtctttgatgaggggaagtcctggcacagtgagaccaagaactccctgatgcaggacagagatgctgcctcagccagggcctggcccaagatgcacacagtgaatgggtatgtcaacaggagcctgccaggcctgattgggtgccacagaaagtcagtgtactggcatgtcattggcatgggcaccaccccagaggtgcactccatcttcctggagggccacaccttcctggtgaggaaccacagacaggccagcctggagatcagcccaatcaccttcctcacagcccagaccctcctcatggacctgggccagtttctcctgttctgccacatctcctcccaccagcatgatggcatggaggcctatgtgaaggtggacagctgccctgaggagccccagctcaggatgaagaacaatgaggaggcagaggactatgatgatgatctgacagactctgagatggatgtggtgagatttgatgatgacaacagcccctccttcatccagatcaggtctgtggccaagaagcaccctaagacctgggtgcactacattgcagctgaggaggaggactgggactatgcccccctggtcctggcccctgatgataggtcctacaagtcccagtacctgaacaatggcccccagaggatagggagaaagtacaagaaggtgaggttcatggcctacactgatgagaccttcaagactagggaagccatccagcatgagtctgggatcctgggccccctcctctatggggaggtgggggacaccctgctgatcatcttcaagaaccaggccagcaggccctacaacatttacccccatgggatcacagatgtgagacccctgtacagcaggagactgccaaagggggtgaagcacctgaaggacttccccatcctgccaggggagatcttcaagtacaagtggactgtgacagtggaggatgggcccaccaaatctgaccctagatgcctgaccagatactacagcagctttgtgaacatggagagggacctggcctctggactgattggccctctgctgatctgctacaaggagagtgtggaccagaggggaaaccagatcatgtctgacaagaggaatgtgatcctgttctcagtgtttgatgagaacagatcctggtacctcactgagaacatccagaggttcctgcccaacccagcaggggtgcagctggaggacccagagttccaggcctccaacatcatgcactccatcaatggctatgtctttgactccctgcagctgtcagtgtgcctgcatgaggtggcctactggtacatcctctccattggagcccagactgacttcctgtcagtcttcttcagtggctacaccttcaagcacaagatggtctatgaggacactctgaccctgttccccttctctggggagactgtgttcatgtccatggagaaccctggactgtggatcctgggctgccacaacagtgacttcaggaacaggggcatgactgccctgctgaaggtctccagctgtgacaagaacactggggactactatgaggactcctatgaggacatctctgcctacctgctgtccaagaacaatgccattgagcccaggtccttctcccagaacagcagacacccctccaccaggcagaagcagttcaatgcaaccaccatccctgaaaataccaccctgcagagtgaccaggaggagattgactatgatgacaccatctctgtggagatgaagaaggaggactttgacatctatgatgaggatgagaaccagagccctagaagcttccagaagaagaccagacactacttcattgctgcagtggaaagactgtgggactatgggatgagctcctccccccatgtgctgaggaacagggcccagtctggctctgtgccccagttcaagaaggtggtgttccaggagttcactgatggctccttcacccagcccctgtacaggggagagctgaatgagcacctgggcctgctgggcccctacatcagggctgaggtggaggacaatatcatggtgaccttcagaaaccaggcctccagaccttactccttctacagcagcctgatctcctatgaggaggaccagagacagggggctgagcccaggaagaactttgtgaagcccaatgagaccaagacctacttctggaaggtgcagcaccacatggcccccaccaaggatgagtttgactgcaaggcctgggcctacttctctgatgtggacctggagaaggatgtgcactctggcctgattggccccctgctggtgtgccacaccaacaccctgaaccctgcccatggcaggcaggtgactgtgcaggagtttgccctgttcttcaccatctttgatgagaccaagagctggtacttcactgagaacatggagaggaactgcagggccccctgcaacatccagatggaggaccccaccttcaaggagaactacaggttccatgccatcaatggctacatcatggacaccctgcctggcctggtgatggcccaggaccagaggatcaggtggtacctgctgagcatggggagcaatgagaacatccacagcatccacttctctggccatgtgttcacagtgaggaagaaggaggagtacaagatggccctgtacaacctgtaccctggggtgtttgagacagtggagatgctgccctccaaggctggaatctggagggtggagtgcctgattggggagcacctgcatgctggcatgagcaccctgttcctggtgtacagcaacaagtgccagacccccctgggcatggcctctggccacatcagagacttccagatcacagcctcaggccagtatggccagtgggcccccaagctggccaggctgcactactctggcagcatcaatgcctggtccaccaaggagcccttcagctggatcaaggtggacctcctggcccccatgatcatccatggcatcaagacccagggggccaggcagaagttcagctccctgtacatctcccagttcatcatcatgtactccctggatggcaagaagtggcagacctacagaggcaacagcacaggcaccctgatggtgttctttggcaatgtggacagctctgggatcaagcacaacatcttcaacccccccatcattgccaggtacatcagactgcaccccacccactactccatcaggtccaccctgagaatggagctgatgggctgtgacctgaacagctgcagcatgcccctgggcatggagagcaaggccatctctgatgcccagatcacagccagcagctacttcaccaacatgtttgccacctggtcccccagcaaggccaggctgcacctgcagggcaggagcaatgcctggaggccccaggtgaacaaccccaaggagtggctgcaggtggacttccagaagaccatgaaggtgacaggggtgaccacccagggggtgaagtccctgctgaccagcatgtatgtgaaggagttcctgatcagcagctcccaggatggccaccagtggaccctgttcttccagaatggcaaggtgaaggtgttccagggcaaccaggacagcttcacccctgtggtgaactccctggacccccccctgctgaccagatacctgaggatccacccccagtcctgggtgcaccagattgccctgagaatggaggtgctgggctgtgaggcccaggacctgtactga

SEQ ID NO: 178 - DNA, 4392 bp, Artificial Sequence
  Description of Artificial Sequence: Synthetic polynucleotide
atgatgaggcccattgtcctggtgcttctatttgcaacaagtgccctggcccaagtagccaccaggagatactacctgggggctgtggagctgtcctgggactacatgcagtcagacctgggggagctgccagttgatgccaggttcccccccagagtccccaagtccttccccttcaacacctcagtggtgtacaaaaagaccctgtttgtggagttcacagaccacctgttcaacatagccaagcccaggcccccctggatgggcctgctgggccccaccatccaggcagaggtttatgacacagtggtcatcaccctgaagaacatggcctcccaccctgtgtccctccatgctgtgggggtgagctactggaaggccagtgagggggcagaatatgatgaccagaccagccagagggagaaggaggatgacaaggtgttcccagggggcagccacacctatgtgtggcaggtcctgaaggagaatggccccatggcctctgaccccctctgcctcacctactcctacctgtcccatgtggacctggtgaaggacctcaactctggcctgattggagccctcctggtgtgcagggaggggagcctggccaaggaaaagacccagaccctgcacaagtttatcctgctctttgcagtctttgatgaggggaagtcctggcacagtgagaccaagaactccctgatgcaggacagagatgctgcctcagccagggcctggcccaagatgcacacagtgaatgggtatgtcaacaggagcctgccaggcctgattgggtgccacagaaagtcagtgtactggcatgtcattggcatgggcaccaccccagaggtgcactccatcttcctggagggccacaccttcctggtgaggaaccacagacaggccagcctggagatcagcccaatcaccttcctcacagcccagaccctcctcatggacctgggccagtttctcctgttctgccacatctcctcccaccagcatgatggcatggaggcctatgtgaaggtggacagctgccctgaggagccccagctcaggatgaagaacaatgaggaggcagaggactatgatgatgatctgacagactctgagatggatgtggtgagatttgatgatgacaacagcccctccttcatccagatcaggtctgtggccaagaagcaccctaagacctgggtgcactacattgcagctgaggaggaggactgggactatgcccccctggtcctggcccctgatgataggtcctacaagtcccagtacctgaacaatggcccccagaggatagggagaaagtacaagaaggtgaggttcatggcctacactgatgagaccttcaagactagggaagccatccagcatgagtctgggatcctgggccccctcctctatggggaggtgggggacaccctgctgatcatcttcaagaaccaggccagcaggccctacaacatttacccccatgggatcacagatgtgagacccctgtacagcaggagactgccaaagggggtgaagcacctgaaggacttccccatcctgccaggggagatcttcaagtacaagtggactgtgacagtggaggatgggcccaccaaatctgaccctagatgcctgaccagatactacagcagctttgtgaacatggagagggacctggcctctggactgattggccctctgctgatctgctacaaggagagtgtggaccagaggggaaaccagatcatgtctgacaagaggaatgtgatcctgttctcagtgtttgatgagaacagatcctggtacctcactgagaacatccagaggttcctgcccaacccagcaggggtgcagctggaggacccagagttccaggcctccaacatcatgcactccatcaatggctatgtctttgactccctgcagctgtcagtgtgcctgcatgaggtggcctactggtacatcctctccattggagcccagactgacttcctgtcagtcttcttcagtggctacaccttcaagcacaagatggtctatgaggacactctgaccctgttccccttctctggggagactgtgttcatgtccatggagaaccctggactgtggatcctgggctgccacaacagtgacttcaggaacaggggcatgactgccctgctgaaggtctccagctgtgacaagaacactggggactactatgaggactcctatgaggacatctctgcctacctgctgtccaagaacaatgccattgagcccaggtccttctcccagaacagcagacacccctccaccaggcagaagcagttcaatgcaaccaccatccctgaaaataccaccctgcagagtgaccaggaggagattgactatgatgacaccatctctgtggagatgaagaaggaggactttgacatctatgatgaggatgagaaccagagccctagaagcttccagaagaagaccagacactacttcattgctgcagtggaaagactgtgggactatgggatgagctcctccccccatgtgctgaggaacagggcccagtctggctctgtgccccagttcaagaaggtggtgttccaggagttcactgatggctccttcacccagcccctgtacaggggagagctgaatgagcacctgggcctgctgggcccctacatcagggctgaggtggaggacaatatcatggtgaccttcagaaaccaggcctccagaccttactccttctacagcagcctgatctcctatgaggaggaccagagacagggggctgagcccaggaagaactttgtgaagcccaatgagaccaagacctacttctggaaggtgcagcaccacatggcccccaccaaggatgagtttgactgcaaggcctgggcctacttctctgatgtggacctggagaaggatgtgcactctggcctgattggccccctgctggtgtgccacaccaacaccctgaaccctgcccatggcaggcaggtgactgtgcaggagtttgccctgttcttcaccatctttgatgagaccaagagctggtacttcactgagaacatggagaggaactgcagggccccctgcaacatccagatggaggaccccaccttcaaggagaactacaggttccatgccatcaatggctacatcatggacaccctgcctggcctggtgatggcccaggaccagaggatcaggtggtacctgctgagcatggggagcaatgagaacatccacagcatccacttctctggccatgtgttcacagtgaggaagaaggaggagtacaagatggccctgtacaacctgtaccctggggtgtttgagacagtggagatgctgccctccaaggctggaatctggagggtggagtgcctgattggggagcacctgcatgctggcatgagcaccctgttcctggtgtacagcaacaagtgccagacccccctgggcatggcctctggccacatcagagacttccagatcacagcctcaggccagtatggccagtgggcccccaagctggccaggctgcactactctggcagcatcaatgcctggtccaccaaggagcccttcagctggatcaaggtggacctcctggcccccatgatcatccatggcatcaagacccagggggccaggcagaagttcagctccctgtacatctcccagttcatcatcatgtactccctggatggcaagaagtggcagacctacagaggcaacagcacaggcaccctgatggtgttctttggcaatgtggacagctctgggatcaagcacaacatcttcaacccccccatcattgccaggtacatcagactgcaccccacccactactccatcaggtccaccctgagaatggagctgatgggctgtgacctgaacagctgcagcatgcccctgggcatggagagcaaggccatctctgatgcccagatcacagccagcagctacttcaccaacatgtttgccacctggtcccccagcaaggccaggctgcacctgcagggcaggagcaatgcctggaggccccaggtgaacaaccccaaggagtggctgcaggtggacttccagaagaccatgaaggtgacaggggtgaccacccagggggtgaagtccctgctgaccagcatgtatgtgaaggagttcctgatcagcagctcccaggatggccaccagtggaccctgttcttccagaatggcaaggtgaaggtgttccagggcaaccaggacagcttcacccctgtggtgaactccctggacccccccctgctgaccagatacctgaggatccacccccagtcctgggtgcaccagattgccctgagaatggaggtgctgggctgtgaggcccaggacctgtactga

SEQ ID NO: 179 - DNA, 4377 bp, Artificial Sequence
  Description of Artificial Sequence: Synthetic polynucleotide
atgcagttgctgtcttgtattgccctgattttggctctagtggccaccaggagatactacctgggggctgtggagctgtcctgggactacatgcagtcagacctgggggagctgccagttgatgccaggttcccccccagagtccccaagtccttccccttcaacacctcagtggtgtacaaaaagaccctgtttgtggagttcacagaccacctgttcaacatagccaagcccaggcccccctggatgggcctgctgggccccaccatccaggcagaggtttatgacacagtggtcatcaccctgaagaacatggcctcccaccctgtgtccctccatgctgtgggggtgagctactggaaggccagtgagggggcagaatatgatgaccagaccagccagagggagaaggaggatgacaaggtgttcccagggggcagccacacctatgtgtggcaggtcctgaaggagaatggccccatggcctctgaccccctctgcctcacctactcctacctgtcccatgtggacctggtgaaggacctcaactctggcctgattggagccctcctggtgtgcagggaggggagcctggccaaggaaaagacccagaccctgcacaagtttatcctgctctttgcagtctttgatgaggggaagtcctggcacagtgagaccaagaactccctgatgcaggacagagatgctgcctcagccagggcctggcccaagatgcacacagtgaatgggtatgtcaacaggagcctgccaggcctgattgggtgccacagaaagtcagtgtactggcatgtcattggcatgggcaccaccccagaggtgcactccatcttcctggagggccacaccttcctggtgaggaaccacagacaggccagcctggagatcagcccaatcaccttcctcacagcccagaccctcctcatggacctgggccagtttctcctgttctgccacatctcctcccaccagcatgatggcatggaggcctatgtgaaggtggacagctgccctgaggagccccagctcaggatgaagaacaatgaggaggcagaggactatgatgatgatctgacagactctgagatggatgtggtgagatttgatgatgacaacagcccctccttcatccagatcaggtctgtggccaagaagcaccctaagacctgggtgcactacattgcagctgaggaggaggactgggactatgcccccctggtcctggcccctgatgataggtcctacaagtcccagtacctgaacaatggcccccagaggatagggagaaagtacaagaaggtgaggttcatggcctacactgatgagaccttcaagactagggaagccatccagcatgagtctgggatcctgggccccctcctctatggggaggtgggggacaccctgctgatcatcttcaagaaccaggccagcaggccctacaacatttacccccatgggatcacagatgtgagacccctgtacagcaggagactgccaaagggggtgaagcacctgaaggacttccccatcctgccaggggagatcttcaagtacaagtggactgtgacagtggaggatgggcccaccaaatctgaccctagatgcctgaccagatactacagcagctttgtgaacatggagagggacctggcctctggactgattggccctctgctgatctgctacaaggagagtgtggaccagaggggaaaccagatcatgtctgacaagaggaatgtgatcctgttctcagtgtttgatgagaacagatcctggtacctcactgagaacatccagaggttcctgcccaacccagcaggggtgcagctggaggacccagagttccaggcctccaacatcatgcactccatcaatggctatgtctttgactccctgcagctgtcagtgtgcctgcatgaggtggcctactggtacatcctctccattggagcccagactgacttcctgtcagtcttcttcagtggctacaccttcaagcacaagatggtctatgaggacactctgaccctgttccccttctctggggagactgtgttcatgtccatggagaaccctggactgtggatcctgggctgccacaacagtgacttcaggaacaggggcatgactgccctgctgaaggtctccagctgtgacaagaacactggggactactatgaggactcctatgaggacatctctgcctacctgctgtccaagaacaatgccattgagcccaggtccttctcccagaacagcagacacccctccaccaggcagaagcagttcaatgcaaccaccatccctgaaaataccaccctgcagagtgaccaggaggagattgactatgatgacaccatctctgtggagatgaagaaggaggactttgacatctatgatgaggatgagaaccagagccctagaagcttccagaagaagaccagacactacttcattgctgcagtggaaagactgtgggactatgggatgagctcctccccccatgtgctgaggaacagggcccagtctggctctgtgccccagttcaagaaggtggtgttccaggagttcactgatggctccttcacccagcccctgtacaggggagagctgaatgagcacctgggcctgctgggcccctacatcagggctgaggtggaggacaatatcatggtgaccttcagaaaccaggcctccagaccttactccttctacagcagcctgatctcctatgaggaggaccagagacagggggctgagcccaggaagaactttgtgaagcccaatgagaccaagacctacttctggaaggtgcagcaccacatggcccccaccaaggatgagtttgactgcaaggcctgggcctacttctctgatgtggacctggagaaggatgtgcactctggcctgattggccccctgctggtgtgccacaccaacaccctgaaccctgcccatggcaggcaggtgactgtgcaggagtttgccctgttcttcaccatctttgatgagaccaagagctggtacttcactgagaacatggagaggaactgcagggccccctgcaacatccagatggaggaccccaccttcaaggagaactacaggttccatgccatcaatggctacatcatggacaccctgcctggcctggtgatggcccaggaccagaggatcaggtggtacctgctgagcatggggagcaatgagaacatccacagcatccacttctctggccatgtgttcacagtgaggaagaaggaggagtacaagatggccctgtacaacctgtaccctggggtgtttgagacagtggagatgctgccctccaaggctggaatctggagggtggagtgcctgattggggagcacctgcatgctggcatgagcaccctgttcctggtgtacagcaacaagtgccagacccccctgggcatggcctctggccacatcagagacttccagatcacagcctcaggccagtatggccagtgggcccccaagctggccaggctgcactactctggcagcatcaatgcctggtccaccaaggagcccttcagctggatcaaggtggacctcctggcccccatgatcatccatggcatcaagacccagggggccaggcagaagttcagctccctgtacatctcccagttcatcatcatgtactccctggatggcaagaagtggcagacctacagaggcaacagcacaggcaccctgatggtgttctttggcaatgtggacagctctgggatcaagcacaacatcttcaacccccccatcattgccaggtacatcagactgcaccccacccactactccatcaggtccaccctgagaatggagctgatgggctgtgacctgaacagctgcagcatgcccctgggcatggagagcaaggccatctctgatgcccagatcacagccagcagctacttcaccaacatgtttgccacctggtcccccagcaaggccaggctgcacctgcagggcaggagcaatgcctggaggccccaggtgaacaaccccaaggagtggctgcaggtggacttccagaagaccatgaaggtgacaggggtgaccacccagggggtgaagtccctgctgaccagcatgtatgtgaaggagttcctgatcagcagctcccaggatggccaccagtggaccctgttcttccagaatggcaaggtgaaggtgttccagggcaaccaggacagcttcacccctgtggtgaactccctggacccccccctgctgaccagatacctgaggatccacccccagtcctgggtgcaccagattgccctgagaatggaggtgctgggctgtgaggcccaggacctgtactga

SEQ ID NO: 180 - DNA, 4386 bp, Artificial Sequence
  Description of Artificial Sequence: Synthetic polynucleotide
atgggggtgaaagttctgtttgctctcatctgtattgctgtggctgaagctgccaccaggagatactacctgggggctgtggagctgtcctgggactacatgcagtcagacctgggggagctgccagttgatgccaggttcccccccagagtccccaagtccttccccttcaacacctcagtggtgtacaaaaagaccctgtttgtggagttcacagaccacctgttcaacatagccaagcccaggcccccctggatgggcctgctgggccccaccatccaggcagaggtttatgacacagtggtcatcaccctgaagaacatggcctcccaccctgtgtccctccatgctgtgggggtgagctactggaaggccagtgagggggcagaatatgatgaccagaccagccagagggagaaggaggatgacaaggtgttcccagggggcagccacacctatgtgtggcaggtcctgaaggagaatggccccatggcctctgaccccctctgcctcacctactcctacctgtcccatgtggacctggtgaaggacctcaactctggcctgattggagccctcctggtgtgcagggaggggagcctggccaaggaaaagacccagaccctgcacaagtttatcctgctctttgcagtctttgatgaggggaagtcctggcacagtgagaccaagaactccctgatgcaggacagagatgctgcctcagccagggcctggcccaagatgcacacagtgaatgggtatgtcaacaggagcctgccaggcctgattgggtgccacagaaagtcagtgtactggcatgtcattggcatgggcaccaccccagaggtgcactccatcttcctggagggccacaccttcctggtgaggaaccacagacaggccagcctggagatcagcccaatcaccttcctcacagcccagaccctcctcatggacctgggccagtttctcctgttctgccacatctcctcccaccagcatgatggcatggaggcctatgtgaaggtggacagctgccctgaggagccccagctcaggatgaagaacaatgaggaggcagaggactatgatgatgatctgacagactctgagatggatgtggtgagatttgatgatgacaacagcccctccttcatccagatcaggtctgtggccaagaagcaccctaagacctgggtgcactacattgcagctgaggaggaggactgggactatgcccccctggtcctggcccctgatgataggtcctacaagtcccagtacctgaacaatggcccccagaggatagggagaaagtacaagaaggtgaggttcatggcctacactgatgagaccttcaagactagggaagccatccagcatgagtctgggatcctgggccccctcctctatggggaggtgggggacaccctgctgatcatcttcaagaaccaggccagcaggccctacaacatttacccccatgggatcacagatgtgagacccctgtacagcaggagactgccaaagggggtgaagcacctgaaggacttccccatcctgccaggggagatcttcaagtacaagtggactgtgacagtggaggatgggcccaccaaatctgaccctagatgcctgaccagatactacagcagctttgtgaacatggagagggacctggcctctggactgattggccctctgctgatctgctacaaggagagtgtggaccagaggggaaaccagatcatgtctgacaagaggaatgtgatcctgttctcagtgtttgatgagaacagatcctggtacctcactgagaacatccagaggttcctgcccaacccagcaggggtgcagctggaggacccagagttccaggcctccaacatcatgcactccatcaatggctatgtctttgactccctgcagctgtcagtgtgcctgcatgaggtggcctactggtacatcctctccattggagcccagactgacttcctgtcagtcttcttcagtggctacaccttcaagcacaagatggtctatgaggacactctgaccctgttccccttctctggggagactgtgttcatgtccatggagaaccctggactgtggatcctgggctgccacaacagtgacttcaggaacaggggcatgactgccctgctgaaggtctccagctgtgacaagaacactggggactactatgaggactcctatgaggacatctctgcctacctgctgtccaagaacaatgccattgagcccaggtccttctcccagaacagcagacacccctccaccaggcagaagcagttcaatgcaaccaccatccctgaaaataccaccctgcagagtgaccaggaggagattgactatgatgacaccatctctgtggagatgaagaaggaggactttgacatctatgatgaggatgagaaccagagccctagaagcttccagaagaagaccagacactacttcattgctgcagtggaaagactgtgggactatgggatgagctcctccccccatgtgctgaggaacagggcccagtctggctctgtgccccagttcaagaaggtggtgttccaggagttcactgatggctccttcacccagcccctgtacaggggagagctgaatgagcacctgggcctgctgggcccctacatcagggctgaggtggaggacaatatcatggtgaccttcagaaaccaggcctccagaccttactccttctacagcagcctgatctcctatgaggaggaccagagacagggggctgagcccaggaagaactttgtgaagcccaatgagaccaagacctacttctggaaggtgcagcaccacatggcccccaccaaggatgagtttgactgcaaggcctgggcctacttctctgatgtggacctggagaaggatgtgcactctggcctgattggccccctgctggtgtgccacaccaacaccctgaaccctgcccatggcaggcaggtgactgtgcaggagtttgccctgttcttcaccatctttgatgagaccaagagctggtacttcactgagaacatggagaggaactgcagggccccctgcaacatccagatggaggaccccaccttcaaggagaactacaggttccatgccatcaatggctacatcatggacaccctgcctggcctggtgatggcccaggaccagaggatcaggtggtacctgctgagcatggggagcaatgagaacatccacagcatccacttctctggccatgtgttcacagtgaggaagaaggaggagtacaagatggccctgtacaacctgtaccctggggtgtttgagacagtggagatgctgccctccaaggctggaatctggagggtggagtgcctgattggggagcacctgcatgctggcatgagcaccctgttcctggtgtacagcaacaagtgccagacccccctgggcatggcctctggccacatcagagacttccagatcacagcctcaggccagtatggccagtgggcccccaagctggccaggctgcactactctggcagcatcaatgcctggtccaccaaggagcccttcagctggatcaaggtggacctcctggcccccatgatcatccatggcatcaagacccagggggccaggcagaagttcagctccctgtacatctcccagttcatcatcatgtactccctggatggcaagaagtggcagacctacagaggcaacagcacaggcaccctgatggtgttctttggcaatgtggacagctctgggatcaagcacaacatcttcaacccccccatcattgccaggtacatcagactgcaccccacccactactccatcaggtccaccctgagaatggagctgatgggctgtgacctgaacagctgcagcatgcccctgggcatggagagcaaggccatctctgatgcccagatcacagccagcagctacttcaccaacatgtttgccacctggtcccccagcaaggccaggctgcacctgcagggcaggagcaatgcctggaggccccaggtgaacaaccccaaggagtggctgcaggtggacttccagaagaccatgaaggtgacaggggtgaccacccagggggtgaagtccctgctgaccagcatgtatgtgaaggagttcctgatcagcagctcccaggatggccaccagtggaccctgttcttccagaatggcaaggtgaaggtgttccagggcaaccaggacagcttcacccctgtggtgaactccctggacccccccctgctgaccagatacctgaggatccacccccagtcctgggtgcaccagattgccctgagaatggaggtgctgggctgtgaggcccaggacctgtactga

SEQ ID NO: 181 - DNA, 4389 bp, Artificial Sequence
  Description of Artificial Sequence: Synthetic polynucleotide
atggcatttctgtggctgctgtcctgctgggctctgctgggcactacctttggggccaccaggagatactacctgggggctgtggagctgtcctgggactacatgcagtcagacctgggggagctgccagttgatgccaggttcccccccagagtccccaagtccttccccttcaacacctcagtggtgtacaaaaagaccctgtttgtggagttcacagaccacctgttcaacatagccaagcccaggcccccctggatgggcctgctgggccccaccatccaggcagaggtttatgacacagtggtcatcaccctgaagaacatggcctcccaccctgtgtccctccatgctgtgggggtgagctactggaaggccagtgagggggcagaatatgatgaccagaccagccagagggagaaggaggatgacaaggtgttcccagggggcagccacacctatgtgtggcaggtcctgaaggagaatggccccatggcctctgaccccctctgcctcacctactcctacctgtcccatgtggacctggtgaaggacctcaactctggcctgattggagccctcctggtgtgcagggaggggagcctggccaaggaaaagacccagaccctgcacaagtttatcctgctctttgcagtctttgatgaggggaagtcctggcacagtgagaccaagaactccctgatgcaggacagagatgctgcctcagccagggcctggcccaagatgcacacagtgaatgggtatgtcaacaggagcctgccaggcctgattgggtgccacagaaagtcagtgtactggcatgtcattggcatgggcaccaccccagaggtgcactccatcttcctggagggccacaccttcctggtgaggaaccacagacaggccagcctggagatcagcccaatcaccttcctcacagcccagaccctcctcatggacctgggccagtttctcctgttctgccacatctcctcccaccagcatgatggcatggaggcctatgtgaaggtggacagctgccctgaggagccccagctcaggatgaagaacaatgaggaggcagaggactatgatgatgatctgacagactctgagatggatgtggtgagatttgatgatgacaacagcccctccttcatccagatcaggtctgtggccaagaagcaccctaagacctgggtgcactacattgcagctgaggaggaggactgggactatgcccccctggtcctggcccctgatgataggtcctacaagtcccagtacctgaacaatggcccccagaggatagggagaaagtacaagaaggtgaggttcatggcctacactgatgagaccttcaagactagggaagccatccagcatgagtctgggatcctgggccccctcctctatggggaggtgggggacaccctgctgatcatcttcaagaaccaggccagcaggccctacaacatttacccccatgggatcacagatgtgagacccctgtacagcaggagactgccaaagggggtgaagcacctgaaggacttccccatcctgccaggggagatcttcaagtacaagtggactgtgacagtggaggatgggcccaccaaatctgaccctagatgcctgaccagatactacagcagctttgtgaacatggagagggacctggcctctggactgattggccctctgctgatctgctacaaggagagtgtggaccagaggggaaaccagatcatgtctgacaagaggaatgtgatcctgttctcagtgtttgatgagaacagatcctggtacctcactgagaacatccagaggttcctgcccaacccagcaggggtgcagctggaggacccagagttccaggcctccaacatcatgcactccatcaatggctatgtctttgactccctgcagctgtcagtgtgcctgcatgaggtggcctactggtacatcctctccattggagcccagactgacttcctgtcagtcttcttcagtggctacaccttcaagcacaagatggtctatgaggacactctgaccctgttccccttctctggggagactgtgttcatgtccatggagaaccctggactgtggatcctgggctgccacaacagtgacttcaggaacaggggcatgactgccctgctgaaggtctccagctgtgacaagaacactggggactactatgaggactcctatgaggacatctctgcctacctgctgtccaagaacaatgccattgagcccaggtccttctcccagaacagcagacacccctccaccaggcagaagcagttcaatgcaaccaccatccctgaaaataccaccctgcagagtgaccaggaggagattgactatgatgacaccatctctgtggagatgaagaaggaggactttgacatctatgatgaggatgagaaccagagccctagaagcttccagaagaagaccagacactacttcattgctgcagtggaaagactgtgggactatgggatgagctcctccccccatgtgctgaggaacagggcccagtctggctctgtgccccagttcaagaaggtggtgttccaggagttcactgatggctccttcacccagcccctgtacaggggagagctgaatgagcacctgggcctgctgggcccctacatcagggctgaggtggaggacaatatcatggtgaccttcagaaaccaggcctccagaccttactccttctacagcagcctgatctcctatgaggaggaccagagacagggggctgagcccaggaagaactttgtgaagcccaatgagaccaagacctacttctggaaggtgcagcaccacatggcccccaccaaggatgagtttgactgcaaggcctgggcctacttctctgatgtggacctggagaaggatgtgcactctggcctgattggccccctgctggtgtgccacaccaacaccctgaaccctgcccatggcaggcaggtgactgtgcaggagtttgccctgttcttcaccatctttgatgagaccaagagctggtacttcactgagaacatggagaggaactgcagggccccctgcaacatccagatggaggaccccaccttcaaggagaactacaggttccatgccatcaatggctacatcatggacaccctgcctggcctggtgatggcccaggaccagaggatcaggtggtacctgctgagcatggggagcaatgagaacatccacagcatccacttctctggccatgtgttcacagtgaggaagaaggaggagtacaagatggccctgtacaacctgtaccctggggtgtttgagacagtggagatgctgccctccaaggctggaatctggagggtggagtgcctgattggggagcacctgcatgctggcatgagcaccctgttcctggtgtacagcaacaagtgccagacccccctgggcatggcctctggccacatcagagacttccagatcacagcctcaggccagtatggccagtgggcccccaagctggccaggctgcactactctggcagcatcaatgcctggtccaccaaggagcccttcagctggatcaaggtggacctcctggcccccatgatcatccatggcatcaagacccagggggccaggcagaagttcagctccctgtacatctcccagttcatcatcatgtactccctggatggcaagaagtggcagacctacagaggcaacagcacaggcaccctgatggtgttctttggcaatgtggacagctctgggatcaagcacaacatcttcaacccccccatcattgccaggtacatcagactgcaccccacccactactccatcaggtccaccctgagaatggagctgatgggctgtgacctgaacagctgcagcatgcccctgggcatggagagcaaggccatctctgatgcccagatcacagccagcagctacttcaccaacatgtttgccacctggtcccccagcaaggccaggctgcacctgcagggcaggagcaatgcctggaggccccaggtgaacaaccccaaggagtggctgcaggtggacttccagaagaccatgaaggtgacaggggtgaccacccagggggtgaagtccctgctgaccagcatgtatgtgaaggagttcctgatcagcagctcccaggatggccaccagtggaccctgttcttccagaatggcaaggtgaaggtgttccagggcaaccaggacagcttcacccctgtggtgaactccctggacccccccctgctgaccagatacctgaggatccacccccagtcctgggtgcaccagattgccctgagaatggaggtgctgggctgtgaggcccaggacctgtactga

SEQ ID NO: 182 - DNA, 4404 bp, Artificial Sequence
  Description of Artificial Sequence: Synthetic polynucleotide
atgccctcatcagtgtcttggggaatcctgctgctggctggactgtgctgtctggtgcctgtctctctggccaccaggagatactacctgggggctgtggagctgtcctgggactacatgcagtcagacctgggggagctgccagttgatgccaggttcccccccagagtccccaagtccttccccttcaacacctcagtggtgtacaaaaagaccctgtttgtggagttcacagaccacctgttcaacatagccaagcccaggcccccctggatgggcctgctgggccccaccatccaggcagaggtttatgacacagtggtcatcaccctgaagaacatggcctcccaccctgtgtccctccatgctgtgggggtgagctactggaaggccagtgagggggcagaatatgatgaccagaccagccagagggagaaggaggatgacaaggtgttcccagggggcagccacacctatgtgtggcaggtcctgaaggagaatggccccatggcctctgaccccctctgcctcacctactcctacctgtcccatgtggacctggtgaaggacctcaactctggcctgattggagccctcctggtgtgcagggaggggagcctggccaaggaaaagacccagaccctgcacaagtttatcctgctctttgcagtctttgatgaggggaagtcctggcacagtgagaccaagaactccctgatgcaggacagagatgctgcctcagccagggcctggcccaagatgcacacagtgaatgggtatgtcaacaggagcctgccaggcctgattgggtgccacagaaagtcagtgtactggcatgtcattggcatgggcaccaccccagaggtgcactccatcttcctggagggccacaccttcctggtgaggaaccacagacaggccagcctggagatcagcccaatcaccttcctcacagcccagaccctcctcatggacctgggccagtttctcctgttctgccacatctcctcccaccagcatgatggcatggaggcctatgtgaaggtggacagctgccctgaggagccccagctcaggatgaagaacaatgaggaggcagaggactatgatgatgatctgacagactctgagatggatgtggtgagatttgatgatgacaacagcccctccttcatccagatcaggtctgtggccaagaagcaccctaagacctgggtgcactacattgcagctgaggaggaggactgggactatgcccccctggtcctggcccctgatgataggtcctacaagtcccagtacctgaacaatggcccccagaggatagggagaaagtacaagaaggtgaggttcatggcctacactgatgagaccttcaagactagggaagccatccagcatgagtctgggatcctgggccccctcctctatggggaggtgggggacaccctgctgatcatcttcaagaaccaggccagcaggccctacaacatttacccccatgggatcacagatgtgagacccctgtacagcaggagactgccaaagggggtgaagcacctgaaggacttccccatcctgccaggggagatcttcaagtacaagtggactgtgacagtggaggatgggcccaccaaatctgaccctagatgcctgaccagatactacagcagctttgtgaacatggagagggacctggcctctggactgattggccctctgctgatctgctacaaggagagtgtggaccagaggggaaaccagatcatgtctgacaagaggaatgtgatcctgttctcagtgtttgatgagaacagatcctggtacctcactgagaacatccagaggttcctgcccaacccagcaggggtgcagctggaggacccagagttccaggcctccaacatcatgcactccatcaatggctatgtctttgactccctgcagctgtcagtgtgcctgcatgaggtggcctactggtacatcctctccattggagcccagactgacttcctgtcagtcttcttcagtggctacaccttcaagcacaagatggtctatgaggacactctgaccctgttccccttctctggggagactgtgttcatgtccatggagaaccctggactgtggatcctgggctgccacaacagtgacttcaggaacaggggcatgactgccctgctgaaggtctccagctgtgacaagaacactggggactactatgaggactcctatgaggacatctctgcctacctgctgtccaagaacaatgccattgagcccaggtccttctcccagaacagcagacacccctccaccaggcagaagcagttcaatgcaaccaccatccctgaaaataccaccctgcagagtgaccaggaggagattgactatgatgacaccatctctgtggagatgaagaaggaggactttgacatctatgatgaggatgagaaccagagccctagaagcttccagaagaagaccagacactacttcattgctgcagtggaaagactgtgggactatgggatgagctcctccccccatgtgctgaggaacagggcccagtctggctctgtgccccagttcaagaaggtggtgttccaggagttcactgatggctccttcacccagcccctgtacaggggagagctgaatgagcacctgggcctgctgggcccctacatcagggctgaggtggaggacaatatcatggtgaccttcagaaaccaggcctccagaccttactccttctacagcagcctgatctcctatgaggaggaccagagacagggggctgagcccaggaagaactttgtgaagcccaatgagaccaagacctacttctggaaggtgcagcaccacatggcccccaccaaggatgagtttgactgcaaggcctgggcctacttctctgatgtggacctggagaaggatgtgcactctggcctgattggccccctgctggtgtgccacaccaacaccctgaaccctgcccatggcaggcaggtgactgtgcaggagtttgccctgttcttcaccatctttgatgagaccaagagctggtacttcactgagaacatggagaggaactgcagggccccctgcaacatccagatggaggaccccaccttcaaggagaactacaggttccatgccatcaatggctacatcatggacaccctgcctggcctggtgatggcccaggaccagaggatcaggtggtacctgctgagcatggggagcaatgagaacatccacagcatccacttctctggccatgtgttcacagtgaggaagaaggaggagtacaagatggccctgtacaacctgtaccctggggtgtttgagacagtggagatgctgccctccaaggctggaatctggagggtggagtgcctgattggggagcacctgcatgctggcatgagcaccctgttcctggtgtacagcaacaagtgccagacccccctgggcatggcctctggccacatcagagacttccagatcacagcctcaggccagtatggccagtgggcccccaagctggccaggctgcactactctggcagcatcaatgcctggtccaccaaggagcccttcagctggatcaaggtggacctcctggcccccatgatcatccatggcatcaagacccagggggccaggcagaagttcagctccctgtacatctcccagttcatcatcatgtactccctggatggcaagaagtggcagacctacagaggcaacagcacaggcaccctgatggtgttctttggcaatgtggacagctctgggatcaagcacaacatcttcaacccccccatcattgccaggtacatcagactgcaccccacccactactccatcaggtccaccctgagaatggagctgatgggctgtgacctgaacagctgcagcatgcccctgggcatggagagcaaggccatctctgatgcccagatcacagccagcagctacttcaccaacatgtttgccacctggtcccccagcaaggccaggctgcacctgcagggcaggagcaatgcctggaggccccaggtgaacaaccccaaggagtggctgcaggtggacttccagaagaccatgaaggtgacaggggtgaccacccagggggtgaagtccctgctgaccagcatgtatgtgaaggagttcctgatcagcagctcccaggatggccaccagtggaccctgttcttccagaatggcaaggtgaaggtgttccagggcaaccaggacagcttcacccctgtggtgaactccctggacccccccctgctgaccagatacctgaggatccacccccagtcctgggtgcaccagattgccctgagaatggaggtgctgggctgtgaggcccaggacctgtactga

SEQ ID NO: 183 - DNA, 4383 bp, Artificial Sequence
  Description of Artificial Sequence: Synthetic polynucleotide
atgaagtgggtcacctttatatccttactcttctcctcagcatactctgccaccaggagatactacctgggggctgtggagctgtcctgggactacatgcagtcagacctgggggagctgccagttgatgccaggttcccccccagagtccccaagtccttccccttcaacacctcagtggtgtacaaaaagaccctgtttgtggagttcacagaccacctgttcaacatagccaagcccaggcccccctggatgggcctgctgggccccaccatccaggcagaggtttatgacacagtggtcatcaccctgaagaacatggcctcccaccctgtgtccctccatgctgtgggggtgagctactggaaggccagtgagggggcagaatatgatgaccagaccagccagagggagaaggaggatgacaaggtgttcccagggggcagccacacctatgtgtggcaggtcctgaaggagaatggccccatggcctctgaccccctctgcctcacctactcctacctgtcccatgtggacctggtgaaggacctcaactctggcctgattggagccctcctggtgtgcagggaggggagcctggccaaggaaaagacccagaccctgcacaagtttatcctgctctttgcagtctttgatgaggggaagtcctggcacagtgagaccaagaactccctgatgcaggacagagatgctgcctcagccagggcctggcccaagatgcacacagtgaatgggtatgtcaacaggagcctgccaggcctgattgggtgccacagaaagtcagtgtactggcatgtcattggcatgggcaccaccccagaggtgcactccatcttcctggagggccacaccttcctggtgaggaaccacagacaggccagcctggagatcagcccaatcaccttcctcacagcccagaccctcctcatggacctgggccagtttctcctgttctgccacatctcctcccaccagcatgatggcatggaggcctatgtgaaggtggacagctgccctgaggagccccagctcaggatgaagaacaatgaggaggcagaggactatgatgatgatctgacagactctgagatggatgtggtgagatttgatgatgacaacagcccctccttcatccagatcaggtctgtggccaagaagcaccctaagacctgggtgcactacattgcagctgaggaggaggactgggactatgcccccctggtcctggcccctgatgataggtcctacaagtcccagtacctgaacaatggcccccagaggatagggagaaagtacaagaaggtgaggttcatggcctacactgatgagaccttcaagactagggaagccatccagcatgagtctgggatcctgggccccctcctctatggggaggtgggggacaccctgctgatcatcttcaagaaccaggccagcaggccctacaacatttacccccatgggatcacagatgtgagacccctgtacagcaggagactgccaaagggggtgaagcacctgaaggacttccccatcctgccaggggagatcttcaagtacaagtggactgtgacagtggaggatgggcccaccaaatctgaccctagatgcctgaccagatactacagcagctttgtgaacatggagagggacctggcctctggactgattggccctctgctgatctgctacaaggagagtgtggaccagaggggaaaccagatcatgtctgacaagaggaatgtgatcctgttctcagtgtttgatgagaacagatcctggtacctcactgagaacatccagaggttcctgcccaacccagcaggggtgcagctggaggacccagagttccaggcctccaacatcatgcactccatcaatggctatgtctttgactccctgcagctgtcagtgtgcctgcatgaggtggcctactggtacatcctctccattggagcccagactgacttcctgtcagtcttcttcagtggctacaccttcaagcacaagatggtctatgaggacactctgaccctgttccccttctctggggagactgtgttcatgtccatggagaaccctggactgtggatcctgggctgccacaacagtgacttcaggaacaggggcatgactgccctgctgaaggtctccagctgtgacaagaacactggggactactatgaggactcctatgaggacatctctgcctacctgctgtccaagaacaatgccattgagcccaggtccttctcccagaacagcagacacccctccaccaggcagaagcagttcaatgcaaccaccatccctgaaaataccaccctgcagagtgaccaggaggagattgactatgatgacaccatctctgtggagatgaagaaggaggactttgacatctatgatgaggatgagaaccagagccctagaagcttccagaagaagaccagacactacttcattgctgcagtggaaagactgtgggactatgggatgagctcctccccccatgtgctgaggaacagggcccagtctggctctgtgccccagttcaagaaggtggtgttccaggagttcactgatggctccttcacccagcccctgtacaggggagagctgaatgagcacctgggcctgctgggcccctacatcagggctgaggtggaggacaatatcatggtgaccttcagaaaccaggcctccagaccttactccttctacagcagcctgatctcctatgaggaggaccagagacagggggctgagcccaggaagaactttgtgaagcccaatgagaccaagacctacttctggaaggtgcagcaccacatggcccccaccaaggatgagtttgactgcaaggcctgggcctacttctctgatgtggacctggagaaggatgtgcactctggcctgattggccccctgctggtgtgccacaccaacaccctgaaccctgcccatggcaggcaggtgactgtgcaggagtttgccctgttcttcaccatctttgatgagaccaagagctggtacttcactgagaacatggagaggaactgcagggccccctgcaacatccagatggaggaccccaccttcaaggagaactacaggttccatgccatcaatggctacatcatggacaccctgcctggcctggtgatggcccaggaccagaggatcaggtggtacctgctgagcatggggagcaatgagaacatccacagcatccacttctctggccatgtgttcacagtgaggaagaaggaggagtacaagatggccctgtacaacctgtaccctggggtgtttgagacagtggagatgctgccctccaaggctggaatctggagggtggagtgcctgattggggagcacctgcatgctggcatgagcaccctgttcctggtgtacagcaacaagtgccagacccccctgggcatggcctctggccacatcagagacttccagatcacagcctcaggccagtatggccagtgggcccccaagctggccaggctgcactactctggcagcatcaatgcctggtccaccaaggagcccttcagctggatcaaggtggacctcctggcccccatgatcatccatggcatcaagacccagggggccaggcagaagttcagctccctgtacatctcccagttcatcatcatgtactccctggatggcaagaagtggcagacctacagaggcaacagcacaggcaccctgatggtgttctttggcaatgtggacagctctgggatcaagcacaacatcttcaacccccccatcattgccaggtacatcagactgcaccccacccactactccatcaggtccaccctgagaatggagctgatgggctgtgacctgaacagctgcagcatgcccctgggcatggagagcaaggccatctctgatgcccagatcacagccagcagctacttcaccaacatgtttgccacctggtcccccagcaaggccaggctgcacctgcagggcaggagcaatgcctggaggccccaggtgaacaaccccaaggagtggctgcaggtggacttccagaagaccatgaaggtgacaggggtgaccacccagggggtgaagtccctgctgaccagcatgtatgtgaaggagttcctgatcagcagctcccaggatggccaccagtggaccctgttcttccagaatggcaaggtgaaggtgttccagggcaaccaggacagcttcacccctgtggtgaactccctggacccccccctgctgaccagatacctgaggatccacccccagtcctgggtgcaccagattgccctgagaatggaggtgctgggctgtgaggcccaggacctgtactga

SEQ ID NO: 184 - DNA, 436 bp, Artificial Sequence
  Description of Artificial Sequence: Synthetic polynucleotide
gttaatcattaacgcttgtactttggtacagttaatcattaacgcttgtactttggtacagttaatcattaacgcttgtactttggtacaatcgatgcgagaacttgtgcctccccgtgttcctgctctttgtccctctgtcctacttagactaatatttgccttgggtactgcaaacaggaaatgggggagggacaggagtagggcggagggtagttaagaatgtggatccccgtctgtctgcacatttcgtagagcgagtgttccgatactctaatctccctaggcaaggttcatatttgtgtaggttacttattctccttttgttgactaagtcaataatcagaatcagcaggtttggagtcagcttggcagggatcagcagcctgggttggaaggagggggtataaaagccccttcaccaggagaagccgtc

SEQ ID NO: 185 - DNA, 773 bp, Artificial Sequence
  Description of Artificial Sequence: Synthetic polynucleotide
gttaatcattaacgcttgtactttggtacagttaatcattaacgcttgtactttggtacagttaatcattaacgcttgtactttggtacaatcgatgcgagaacttgtgcctccccgtgttcctgctctttgtccctctgtcctacttagactaatatttgccttgggtactgcaaacaggaaatgggggagggacaggagtagggcggagggtagttaagaatgtcaattggggggaggctgctggtgaatattaaccaaggtcaccccagttatcggaggagcaaacaggggctaagtccaccgggggaggctgctggtgaatattaaccaaggtcaccccagttatcggaggagcaaacaggggctaagtccaccgggggaggctgctggtgaatattaaccaaggtcaccccagttatcggaggagcaaacaggggctaagtccacggtacccactgggaggatgttgagtaagatggaaaactactgatgacccttgcagagacagagtattaggacatgtttgaacaggggccgggcgatcagcaggtagcactagaggatccccgtctgtctgcacatttcgtagagcgagtgttccgatactctaatctccctaggcaaggttcatatttgtgtaggttacttattctccttttgttgactaagtcaataatcagaatcagcaggtttggagtcagcttggcagggatcagcagcctgggttggaaggagggggtataaaagccccttcaccaggagaagccgtc

SEQ ID NO: 186 - DNA, 431 bp, Artificial Sequence
  Description of Artificial Sequence: Synthetic polynucleotide
aacaggttagtttgactagcgttaatcattaacgttaatcattaacgttaatcattaacgttaatcattaacgttaatcattaacatcgatgcgagaacttgtgcctccccgtgttcctgctctttgtccctctgtcctacttagactaatatttgccttgggtactgcaaacaggaaatgggggagggacaggagtagggcggagggtagttaagaatgtggatccccgtctgtctgcacatttcgtagagcgagtgttccgatactctaatctccctaggcaaggttcatatttgtgtaggttacttattctccttttgttgactaagtcaataatcagaatcagcaggtttggagtcagcttggcagggatcagcagcctgggttggaaggagggggtataaaagccccttcaccaggagaagccgtc

SEQ ID NO: 187 - DNA, 768 bp, Artificial Sequence
  Description of Artificial Sequence: Synthetic polynucleotide
aacaggttagtttgactagcgttaatcattaacgttaatcattaacgttaatcattaacgttaatcattaacgttaatcattaacatcgatgcgagaacttgtgcctccccgtgttcctgctctttgtccctctgtcctacttagactaatatttgccttgggtactgcaaacaggaaatgggggagggacaggagtagggcggagggtagttaagaatgtcaattggggggaggctgctggtgaatattaaccaaggtcaccccagttatcggaggagcaaacaggggctaagtccaccgggggaggctgctggtgaatattaaccaaggtcaccccagttatcggaggagcaaacaggggctaagtccaccgggggaggctgctggtgaatattaaccaaggtcaccccagttatcggaggagcaaacaggggctaagtccacggtacccactgggaggatgttgagtaagatggaaaactactgatgacccttgcagagacagagtattaggacatgtttgaacaggggccgggcgatcagcaggtagcactagaggatccccgtctgtctgcacatttcgtagagcgagtgttccgatactctaatctccctaggcaaggttcatatttgtgtaggttacttattctccttttgttgactaagtcaataatcagaatcagcaggtttggagtcagcttggcagggatcagcagcctgggttggaaggagggggtataaaagccccttcaccaggagaagccgtc

SEQ ID NO: 188 - DNA, 540 bp, Artificial Sequence
  Description of Artificial Sequence: Synthetic polynucleotide
gttaatcattaacgcttgtactttggtacagttaatcattaacgcttgtactttggtacagttaatcattaacgcttgtactttggtacaatcgatgcgagaacttgtgcctccccgtgttcctgctctttgtccctctgtcctacttagactaatatttgccttgggtactgcaaacaggaaatgggggagggacaggagtagggcggagggtagcccggggattctgcagtgagagcagagggccagctaagtggtactctcccagagactgtctgactcacgccaccccctccaccttggacacaggacgctgtggtttctgagccaggtacaatgactcctttcggtaagtgcagtggaagctgtacactgcccaggcaaagcgtccgggcagcgtaggcgggcgactcagatcccagccagtggacttagcccctgtttgctcctccgataactggggtgaccttggttaatattcaccagcagcctcccccgttgcccctctggatccactgcttaaatacggacgaggacagg

SEQ ID NO: 189 - DNA, 624 bp, Artificial Sequence
  Description of Artificial Sequence: Synthetic polynucleotide
agcaacagatcattctatgggttaatcattaacaacaggttaggcttgtactttggtacattggctcctagttaatcattaacttagcaatgtgcttgtactttggtacatagttacctagttaatcattaacaaacagtatggcttgtactttggtacaagcaacagatcattctatgggcgagaacttgtgcctccccgtgttcctgctctttgtccctctgtcctacttagactaatatttgccttgggtactgcaaacaggaaatgggggagggacaggagtagggcggagggtagcaattggattctgcagtgagagcagagggccagctaagtggtactctcccagagactgtctgactcacgccaccccctccaccttggacacaggacgctgtggtttctgagccaggtacaatgactcctttcggtaagtgcagtggaagctgtacactgcccaggcaaagcgtccgggcagcgtaggcgggcgactcagatcccagccagtggacttagcccctgtttgctcctccgataactggggtgaccttggttaatattcaccagcagcctcccccgttgcccctctggatccactgcttaaatacggacgaggacagg

SEQ ID NO: 190 - DNA, 951 bp, Artificial Sequence
  Description of Artificial Sequence: Synthetic polynucleotide
aggctcagaggcacacaggagtttctgggctcaccctgcccccttccaacccctcagttcccatcctccagcagctgtttgtgtgctgcctctgaagtccacactgaacaaacttcagcctactcatgtccctaaaatgggcaaacattgcaagcagcaaacagcaaacacacagccctccctgcctgctgaccttggagctggggcagaggtcagagacctctctgggcccatgccacctccaacatccactcgaccccttggaatttcggtggagaggagcagaggttgtcctggcgtggtttaggtagtgtgagagggcttaagagcaacagatcattctatgggttaatcattaacaacaggttaggcttgtactttggtacattggctcctagttaatcattaacttagcaatgtgcttgtactttggtacatagttacctagttaatcattaacaaacagtatggcttgtactttggtacaagcaacagatcattctatgggcgagaacttgtgcctccccgtgttcctgctctttgtccctctgtcctacttagactaatatttgccttgggtactgcaaacaggaaatgggggagggacaggagtagggcggagggtagcaattggattctgcagtgagagcagagggccagctaagtggtactctcccagagactgtctgactcacgccaccccctccaccttggacacaggacgctgtggtttctgagccaggtacaatgactcctttcggtaagtgcagtggaagctgtacactgcccaggcaaagcgtccgggcagcgtaggcgggcgactcagatcccagccagtggacttagcccctgtttgctcctccgataactggggtgaccttggttaatattcaccagcagcctcccccgttgcccctctggatccactgcttaaatacggacgaggacagg

SEQ ID NO: 191 - DNA, 535 bp, Artificial Sequence
  Description of Artificial Sequence: Synthetic polynucleotide
aacaggttagtttgactagcgttaatcattaacgttaatcattaacgttaatcattaacgttaatcattaacgttaatcattaacatcgatgcgagaacttgtgcctccccgtgttcctgctctttgtccctctgtcctacttagactaatatttgccttgggtactgcaaacaggaaatgggggagggacaggagtagggcggagggtagcccggggattctgcagtgagagcagagggccagctaagtggtactctcccagagactgtctgactcacgccaccccctccaccttggacacaggacgctgtggtttctgagccaggtacaatgactcctttcggtaagtgcagtggaagctgtacactgcccaggcaaagcgtccgggcagcgtaggcgggcgactcagatcccagccagtggacttagcccctgtttgctcctccgataactggggtgaccttggttaatattcaccagcagcctcccccgttgcccctctggatccactgcttaaatacggacgaggacagg

SEQ ID NO: 192 - DNA, 579 bp, Artificial Sequence
  Description of Artificial Sequence: Synthetic polynucleotide
agcaacagatcattctatgggttaatcattaacaacaggttaggttaatcattaacttggctcctagttaatcattaacaaacagtatggttaatcattaacaaattctggggttaatcattaactagttacctagcgagaacttgtgcctccccgtgttcctgctctttgtccctctgtcctacttagactaatatttgccttgggtactgcaaacaggaaatgggggagggacaggagtagggcggagggtagcaattggattctgcagtgagagcagagggccagctaagtggtactctcccagagactgtctgactcacgccaccccctccaccttggacacaggacgctgtggtttctgagccaggtacaatgactcctttcggtaagtgcagtggaagctgtacactgcccaggcaaagcgtccgggcagcgtaggcgggcgactcagatcccagccagtggacttagcccctgtttgctcctccgataactggggtgaccttggttaatattcaccagcagcctcccccgttgcccctctggatccactgcttaaatacggacgaggacagg

SEQ ID NO: 193 - DNA, 906 bp, Artificial Sequence
  Description of Artificial Sequence: Synthetic polynucleotide
aggctcagaggcacacaggagtttctgggctcaccctgcccccttccaacccctcagttcccatcctccagcagctgtttgtgtgctgcctctgaagtccacactgaacaaacttcagcctactcatgtccctaaaatgggcaaacattgcaagcagcaaacagcaaacacacagccctccctgcctgctgaccttggagctggggcagaggtcagagacctctctgggcccatgccacctccaacatccactcgaccccttggaatttcggtggagaggagcagaggttgtcctggcgtggtttaggtagtgtgagagggcttaagagcaacagatcattctatgggttaatcattaacaacaggttaggttaatcattaacttggctcctagttaatcattaacaaacagtatggttaatcattaacaaattctggggttaatcattaactagttacctagcgagaacttgtgcctccccgtgttcctgctctttgtccctctgtcctacttagactaatatttgccttgggtactgcaaacaggaaatgggggagggacaggagtagggcggagggtagcaattggattctgcagtgagagcagagggccagctaagtggtactctcccagagactgtctgactcacgccaccccctccaccttggacacaggacgctgtggtttctgagccaggtacaatgactcctttcggtaagtgcagtggaagctgtacactgcccaggcaaagcgtccgggcagcgtaggcgggcgactcagatcccagccagtggacttagcccctgtttgctcctccgataactggggtgaccttggttaatattcaccagcagcctcccccgttgcccctctggatccactgcttaaatacggacgaggacagg

SEQ ID NO: 194 - DNA, 286 bp, Artificial Sequence
  Description of Artificial Sequence: Synthetic polynucleotide
gggggaggctgctggtgaatattaaccaaggtcaccccagttatcggaggagcaaacaggggctaagtccacacgcgtggtaccgtctgtctgcacatttcgtagagcgagtgttccgatactctaatctccctaggcaaggttcatatttgtgtaggttacttattctccttttgttgactaagtcaataatcagaatcagcaggtttggagtcagcttggcagggatcagcagcctgggttggaaggagggggtataaaagccccttcaccaggagaagccgtc

SEQ ID NO: 195 - DNA, 541 bp, Artificial Sequence
  Description of Artificial Sequence: Synthetic polynucleotide
gggggaggctgctggtgaatattaaccaaggtcaccccagttatcggaggagcaaacaggggctaagtccaccgggggaggctgctggtgaatattaaccaaggtcaccccagttatcggaggagcaaacaggggctaagtccaccgggggaggctgctggtgaatattaaccaaggtcaccccagttatcggaggagcaaacaggggctaagtccacggtacccactgggaggatgttgagtaagatggaaaactactgatgacccttgcagagacagagtattaggacatgtttgaacaggggccgggcgatcagcaggtagctctagaggatccccgtctgtctgcacatttcgtagagcgagtgttccgatactctaatctccctaggcaaggttcatatttgtgtaggttacttattctccttttgttgactaagtcaataatcagaatcagcaggtttggagtcagcttggcagggatcagcagcctgggttggaaggagggggtataaaagccccttcaccaggagaagccgtc

SEQ ID NO: 196 - DNA, 452 bp, Artificial Sequence
  Description of Artificial Sequence: Synthetic polynucleotide
cggtacgcgggggaggctgctggtgaatattaaccaaggtcaccccagttatcggaggagcaaacaggggctaagtccaccgggggaggctgctggtgaatattaaccaaggtcaccccagttatcggaggagcaaacaggggctaagtccaccgggggaggctgctggtgaatattaaccaaggtcaccccagttatcggaggagcaaacaggggctaagtccactgtacaacgcgtgaattcgctagcgtctgtctgcacatttcgtagagcgagtgttccgatactctaatctccctaggcaaggttcatatttgtgtaggttacttattctccttttgttgactaagtcaataatcagaatcagcaggtttggagtcagcttggcagggatcagcagcctgggttggaaggagggggtataaaagccccttcaccaggagaagccgtc

SEQ ID NO: 197 - DNA, 1125 bp, Artificial Sequence
  Description of Artificial Sequence: Synthetic polynucleotide
aggctcagaggcacacaggagtttctgggctcaccctgcccccttccaacccctcagttcccatcctccagcagctgtttgtgtgctgcctctgaagtccacactgaacaaacttcagcctactcatgtccctaaaatgggcaaacattgcaagcagcaaacagcaaacacacagccctccctgcctgctgaccttggagctggggcagaggtcagagacctctctgggcccatgccacctccaacatccactcgaccccttggaatttcggtggagaggagcagaggttgtcctggcgtggtttaggtagtgtgagagggtccgggttcaaaaccacttgctgggtggggagtcgtcagtaagtggctatgccccgaccccgaagcctgtttccccatctgtacaatggaaatgataaagacgcccatctgatagggtttttgtggcaaataaacatttggtttttttgttttgttttgttttgttttttgagatggaggtttgctctgtcgcccaggctggagtgcagtgacacaatctcatctcaccacaaccttcccctgcctcagcctcccaagtagctgggattacaagcatgtgccaccacacctggctaattttctatttttagtagagacgggtttctccatgttggtcagcctcagcctcccaagtaactgggattacaggcctgtgccaccacacccggctaattttttctatttttgacagggacggggtttcaccatgttggtcaggctggtctagaggtactggatcttgctaccagtggaacagccactaaggattctgcagtgagagcagagggccagctaagtggtactctcccagagactgtctgactcacgccaccccctccaccttggacacaggacgctgtggtttctgagccaggtacaatgactcctttcggtaagtgcagtggaagctgtacactgcccaggcaaagcgtccgggcagcgtaggcgggcgactcagatcccagccagtggacttagcccctgtttgctcctccgataactggggtgaccttggttaatattcaccagcagcctcccccgttgcccctctggatccactgcttaaatacggacgaggacagg

SEQ ID NO: 198 - DNA, 72 bp, Artificial Sequence
  Description of Artificial Sequence: Synthetic oligonucleotide
gggggaggctgctggtgaatattaaccaaggtcaccccagttatcggaggagcaaacaggggctaagtccac

SEQ ID NO: 199 - DNA, 100 bp, Artificial Sequence
  Description of Artificial Sequence: Synthetic polynucleotide
cactgggaggatgttgagtaagatggaaaactactgatgacccttgcagagacagagtattaggacatgtttgaacaggggccgggcgatcagcaggtag

SEQ ID NO: 200 - DNA, 13 bp, Artificial Sequence
  Description of Artificial Sequence: Synthetic oligonucleotide
gttaatcattaac

SEQ ID NO: 201 - DNA, 17 bp, Artificial Sequence
  Description of Artificial Sequence: Synthetic oligonucleotide
gcttgtactttggtaca

SEQ ID NO: 202 - DNA, 770 bp, Artificial Sequence
  Description of Artificial Sequence: Synthetic polynucleotide
aggctcagaggcacacaggagtttctgggctcaccctgcccccttccaacccctcagttcccatcctccagcagctgtttgtgtgctgcctctgaagtccacactgaacaaacttcagcctactcatgtccctaaaatgggcaaacattgcaagcagcaaacagcaaacacacagccctccctgcctgctgaccttggagctggggcagaggtcagagacctctctgggcccatgccacctccaacatccactcgaccccttggaatttcggtggagaggagcagaggttgtcctggcgtggtttaggtagtgtgagagggtccgggttcaaaaccacttgctgggtggggagtcgtcagtaagtggctatgccccgaccccgaagcctgtttccccatctgtacaatggaaatgataaagacgcccatctgatagggtttttgtggcaaataaacatttggtttttttgttttgttttgttttgttttttgagatggaggtttgctctgtcgcccaggctggagtgcagtgacacaatctcatctcaccacaaccttcccctgcctcagcctcccaagtagctgggattacaagcatgtgccaccacacctggctaattttctatttttagtagagacgggtttctccatgttggtcagcctcagcctcccaagtaactgggattacaggcctgtgccaccacacccggctaattttttctatttttgacagggacggggtttcaccatgttggtcaggctggtctaga

SEQ ID NO: 203 - DNA, 120 bp, Artificial Sequence
  Description of Artificial Sequence: Synthetic polynucleotide
gcgagaacttgtgcctccccgtgttcctgctctttgtccctctgtcctacttagactaatatttgccttgggtactgcaaacaggaaatgggggagggacaggagtagggcggagggtag

SEQ ID NO: 204 - DNA, 770 bp, Artificial Sequence
  Description of Artificial Sequence: Synthetic polynucleotide
aggctcagaggcacacaggagtttctgggctcaccctgcccccttccaacccctcagttcccatcctccagcagctgtttgtgtgctgcctctgaagtccacactgaacaaacttcagcctactcatgtccctaaaatgggcaaacattgcaagcagcaaacagcaaacacacagccctccctgcctgctgaccttggagctggggcagaggtcagagacctctctgggcccatgccacctccaacatccactcgaccccttggaatttcagtggagaggagcagaggttgtcctggtgtggtttaggtagtgtgagagggtccaggttcaaaaccacttgctgggtggggagttgtcagtaagtggctatgccccgaccccgaagcctgtttccccatctgtacaatggaaatgataaagacgcccatctgatagggtttttgtggcaaataaacatttggtttttttgttttgttttgttttgttttttgagatggaggtttgctctgtcgcccaggctggagtgcagtgacacaatctcatctcaccacaaccttcccctgcctcagcctcccaagtagctgggattacaagcatgtgccaccacacctggctaattttctatttttagtagagacgggtttctccatgttggtcagcctcagcctcccaagtaactgggattacaggcctgtgccaccacacccggctaattttttctatttttgacagggacggggtttcaccatgttggtcaggctggtctaga

SEQ ID NO: 205 - DNA, 770 bp, Artificial Sequence
  Description of Artificial Sequence: Synthetic polynucleotide
aggctcagaggcacacaggagtttctgggctcaccctgcccccttccaacccctcagttcccatcctccagcagctgtttgtgtgctgcctctgaagtccacactgaacaaacttcagcctactcatgtccctaaaatgggcaaacattgcaagcagcaaacagcaaacacacagccctccctgcctgctgaccttggagctggggcagaggtcagagacctctctgggcccatgccacctccaacatccacttgaccccttggaatttcggtggagaggagcagaggttgtcctggcgtggtttaggtagtgtgagagggtccgggttcaaaaccacttgctgggtggggagtcgtcagtaagtggctatgccccaaccctgaagcctgtttccccatctgtacaatggaaatgataaagacccccatctgatagggtttttgtggcaaataaacatttggtttttttgttttgttttgttttgttttttgagatggaggtttgctctgtcgcccaggctggagtgcagtgacacaatctcatctcaccacaaccttcccctgcctcagcctcccaagtagctgggattacaagcatgtgccaccacacctggctaattttctatttttagtagagacgggtttctccatgttggtcagcctcagcctcccaagtaactgggattacaggcctgtgccaccacacccggctaattttttctatttttgacagggacggggtttcaccatgttggtcaggctggtctaga

SEQ ID NO: 206 - DNA, 770 bp, Artificial Sequence
  Description of Artificial Sequence: Synthetic polynucleotide
aggctcagaggcacacaggagtttctgggctcaccctgcccccttccaacccctcagttcccatcctccagcagctgtttgtgtgctgcctctgaagtccacactgaacaaacttcagcctactcatgtccctaaaatgggcaaacattgcaagcagcaaacagcaaacacacagccctccctgcctgctgaccttggagctggggcagaggtcagagacctctctgggcccatgccacctccaacatccactcgaccccttggaatttcggtggagaggagcagaggttgtcctggcgtggtttaggtagtgtgagagggtccgggttcaaaaccacttgctgggtggggagtcgtcagtaagtggctatgccccgaccccgaagcctgtttccccatctgtacaatggaaatgataaagacgcccatctgatagggtttttgtggcaaataaacatttggtttttttgttttgttttgttttgttttttgagatggaggtttgctctgtggcccaggctggagtgcagtgacacaatctcatctcaccacaaccttcccctgcctcagcctcccaagtagctgggattacaagcatgtgccaccacacctggctaattttctatttttagtagagatgggtttctccatgttggtcagcctcagcctcccaagtaactgggattacaggcctgtgccaccacacctggctaattttttctatttttgacagggatggggtttcaccatgttggtcaggctggtctaga

SEQ ID NO: 207 - DNA, 770 bp, Artificial Sequence
  Description of Artificial Sequence: Synthetic polynucleotide
aggctcagaggcacacaggagtttctgggctcaccctgcccccttccaacccctcagttcccatcctccagcagctgtttgtgtgctgcctctgaagtccacactgaacaaacttcagcctactcatgtccctaaaatgggcaaacattgcaagcagcaaacagcaaacacacagccctccctgcctgctgaccttggagctggggcagaggtcagagacctctctgggcccatgccacctccaacatccacttgaccccttggaatttcagtggagaggagcagaggttgtcctggtgtggtttaggtagtgtgagagggtccaggttcaaaaccacttgctgggtggggagttgtcagtaagtggctatgccccaaccctgaagcctgtttccccatctgtacaatggaaatgataaagacccccatctgatagggtttttgtggcaaataaacatttggtttttttgttttgttttgttttgttttttgagatggaggtttgctctgtggcccaggctggagtgcagtgacacaatctcatctcaccacaaccttcccctgcctcagcctcccaagtagctgggattacaagcatgtgccaccacacctggctaattttctatttttagtagagatgggtttctccatgttggtcagcctcagcctcccaagtaactgggattacaggcctgtgccaccacacctggctaattttttctatttttgacagggatggggtttcaccatgttggtcaggctggtctaga

SEQ ID NO: 208 - DNA, 117 bp, Artificial Sequence
  Description of Artificial Sequence: Synthetic polynucleotide
ccctaaaatgggcaaacattgcaagcagcaaacagcaaacacacagccctccctgcctgctgaccttggagctggggcagaggtcagagacctctctgggcccatgccacctccaac

SEQ ID NO: 209 - DNA, 90 bp, Artificial Sequence
  Description of Artificial Sequence: Synthetic oligonucleotide
gttaatcattaacgcttgtactttggtacagttaatcattaacgcttgtactttggtacagttaatcattaacgcttgtactttggtaca

SEQ ID NO: 210 - DNA, 348 bp, Artificial Sequence
  Description of Artificial Sequence: Synthetic polynucleotide
gatcttgctaccagtggaacagccactaaggattctgcagtgagagcagagggccagctaagtggtactctcccagagactgtctgactcacgccaccccctccaccttggacacaggacgctgtggtttctgagccaggtacaatgactcctttcggtaagtgcagtggaagctgtacactgcccaggcaaagcgtccgggcagcgtaggcgggcgactcagatcccagccagtggacttagcccctgtttgctcctccgataactggggtgaccttggttaatattcaccagcagcctcccccgttgcccctctggatccactgcttaaatacggacgaggacagg

SEQ ID NO: 211 - DNA, 202 bp, Artificial Sequence
  Description of Artificial Sequence: Synthetic polynucleotide
gtctgtctgcacatttcgtagagcgagtgttccgatactctaatctccctaggcaaggttcatatttgtgtaggttacttattctccttttgttgactaagtcaataatcagaatcagcaggtttggagtcagcttggcagggatcagcagcctgggttggaaggagggggtataaaagccccttcaccaggagaagccgtc

SEQ ID NO: 212 - DNA, 348 bp, Artificial Sequence
  Description of Artificial Sequence: Synthetic polynucleotide
gatcttgctaccagtggaacagccactaaggattctgcagtgagagcagagggccagctaagtggtactctcccagagactgtctgactcatgccaccccctccaccttggacacaggacactgtggtttctgagccaggtacaatgactccttttggtaagtgcagtggaagctgtacactgcccaggcaaagtgtccgggcagcgtaggcgggcgactcagatcccagccagtggacttagcccctgtttgctcctccgataactggggtgaccttggttaatattcaccagcagcctcccccgttgcccctctggatccactgcttaaatacggacgaggacagg

SEQ ID NO: 213 - DNA, 348 bp, Artificial Sequence
  Description of Artificial Sequence: Synthetic polynucleotide
gatcttgctaccagtggaacagccactaaggattctgcagtgagagcagagggccagctaagtggtactctcccagagactgtctgactcacgccaccccctccaccttggacacaggacgctgtggtttctgagccaggtacaatgactcctttcggtaagtgcagtggaagctgtacactgcccaggcaaagcgtccgggcagcgtaggcgggcgactcagatcccagccagtggacttagcccctgtttgctcctctgataactggggtgaccttggttaatattcaccagcagcctcccctgttgcccctctggatccactgcttaaatacggacaaggacagg

SEQ ID NO: 214 - DNA, 348 bp, Artificial Sequence
  Description of Artificial Sequence: Synthetic polynucleotide
gatcttgctaccagtggaacagccactaaggattctgcagtgagagcagagggccagctaagtggtactctcccagagactgtctgactcacgccaccccctccaccttggacacaggacgctgtggtttctgagccaggtacaatgactcctttcggtaagtgcagtggaagctgtacactgcccaggcaaagcgtctgggcagcataggcaggcgactcagatcccagccagtggacttagcccctgtttgctcctccgataactggggtgaccttggttaatattcaccagcagcctcccccgttgcccctctggatccactgcttaaatacggacgaggacagg

SEQ ID NO: 215 - DNA, 348 bp, Artificial Sequence
  Description of Artificial Sequence: Synthetic polynucleotide
gatcttgctaccagtggaacagccactaaggattctgcagtgagagcagagggccagctaagtggtactctcccagagactgtctgactcacgccaccccctccaccttggacacaggacgctgtggtttctgagccaggtacaatgactcctttcggtaagtgcagtggaagctgtacactgcccaggcaaagcgtccgggcagcgtaggcgggcgactcagatcccagccagtggacttagcccctgtttgctcctctgataactggggtgaccttggttaatattcaccagcagcctcccccgttgcccctctggatccactgcttaaatacagacgaggacagg

SEQ ID NO: 216 - DNA, 348 bp, Artificial Sequence
  Description of Artificial Sequence: Synthetic polynucleotide
gatcttgctaccagtggaacagccactaaggattctgcagtgagagcagagggccagctaagtggtactctcccagagactgtctgactcatgccaccccctccaccttggacacaggacactgtggtttctgagccaggtacaatgactccttttggtaagtgcagtggaagctgtacactgcccaggcaaagtgtctgggcagcataggcaggtgactcagatcccagccagtggacttagcccctgtttgctcctctgataactggggtgaccttggttaatattcaccagcagcctcccctgttgcccctctggatccactgcttaaatacagacaaggacagg

SEQ ID NO: 217 - DNA, 318 bp, Artificial Sequence
  Description of Artificial Sequence: Synthetic polynucleotide
gattctgcagtgagagcagagggccagctaagtggtactctcccagagactgtctgactcacgccaccccctccaccttggacacaggacgctgtggtttctgagccaggtacaatgactcctttcggtaagtgcagtggaagctgtacactgcccaggcaaagcgtccgggcagcgtaggcgggcgactcagatcccagccagtggacttagcccctgtttgctcctccgataactggggtgaccttggttaatattcaccagcagcctcccccgttgcccctctggatccactgcttaaatacggacgaggacagg

SEQ ID NO: 218-234 - skipped (17 entries)

SEQ ID NO: 235 - DNA, 91 bp, Artificial Sequence
  Description of Artificial Sequence: Synthetic oligonucleotide
aagaggtaagggtttaagggatggttggttggtggggtattaatgtttaattacctggagcacctgcctgaaatcactttttttcaggttg

SEQ ID NO: 236 - DNA, 92 bp, Artificial Sequence
  Description of Artificial Sequence: Synthetic oligonucleotide
aagaggtaagggtttaagggatggttggttggtggggtattaatgtttaattacctggagcacctgcctgaaatcactttttttcaggttgg

SEQ ID NO: 237 - DNA, 93 bp, Artificial Sequence
  Description of Artificial Sequence: Synthetic oligonucleotide
ctctaaggtaaatataaaatttttaagtgtataatgtgttaaactactgattctaattgtttctctcttttagattccaacctttggaactga

SEQ ID NO: 238 - DNA, 150 bp, Artificial Sequence
  Description of Artificial Sequence: Synthetic polynucleotide
gtaaaggcatgtcctgtagggtctgatcggggccaggattgtggggatgtctccttgctaatagtagaaaagagtagtatggaagcattacttccagctgctttttgaagtgtccaccaaaatgaacgactttttcctttcttcacgcag

SEQ ID NO: 239 - DNA, 250 bp, Artificial Sequence
  Description of Artificial Sequence: Synthetic polynucleotide
gtaaaggcatgtcctgtagggtctgatcggggccaggattgtggggatgttatgattcttatcatatggcacctaatgtatcagttgagttgtgaaaacagtgtttcggtttaatggatgttagggatttatatacaacttcaaatttgcctccttgctaatagtagaaaagagtagtatggaagcattacttccagctgctttttgaagtgtccaccaaaatgaacgactttttcctttcttcacgcag

SEQ ID NO: 240 - DNA, 400 bp, Artificial Sequence
  Description of Artificial Sequence: Synthetic polynucleotide
gtaaaggcatgtcctgtagggtctgatcggggccaggattgtggggatgtaagtctgcttggaggaaggtgcagacatcgggttaggatggttgtgatgctacctgggccccaaagaaacatttctgggtaaggtgtgcacacatctgtgttattagcagaaatgctaactgccaattcttttcataggtctgacctatttatgattcttatcatatggcacctaatgtatcagttgagttgtgaaaacagtgtttcggtttaatggatgttagggatttatatacaacttcaaatttgcctccttgctaatagtagaaaagagtagtatggaagcattacttccagctgctttttgaagtgtccaccaaaatgaacgactttttcctttcttcacgcag

SEQ ID NO: 241 - DNA, 1000 bp, Artificial Sequence
  Description of Artificial Sequence: Synthetic polynucleotide
gtaaaggcatgtcctgtagggtctgatcggggccaggattgtggggatgtaagtctgcttggaggaaggtgcagacatcgggttaggatggttgtgatgctacctgggccccaaagaaacatttctgggtaaggtgtgcacacatctgtgttattagcagaaatgctaactgccaattcttttcataggtctgacctatttgttgatattttgttctgttttgtccattgcttctcttcgtcatatgctgctcctccagaatctagagactggagtagagggagggtgaagggacaaagacaaaacttccctctgcctgcccaagcttccatagagagaatcaaggcaatgaaatccaatcaatatcacacacaagtttcatgtctggttctcttgtgtgtacatgcaatgtgtgtttttataatatcttttcctactttgggtgtaaggataatatgagccttgagttcagaagcttttcgtgttttgggggttctggttgagtaattgggagtatctgagtggagacaagaatgaacattaatgtaggactgattctgaattacagcttctggcactagtaggtttcaatatacatagtctgctgaaaggtaattttctctgtgatattcctggtatccctaaggagggaagtataattttaggtacatactgacaaaatttgaacacaaggtacttagatgaaagttatagtctgttttagagatgaaattgaaggatgcagtagctattgctttggcaaaggatttttggctgatgcagtgtatggttattgattttatgattcttatcatatggcacctaatgtatcagttgagttgtgaaaacagtgtttcggtttaatggatgttagggatttatatacaacttcaaatttgcctccttgctaatagtagaaaagagtagtatggaagcattacttccagctgctttttgaagtgtccaccaaaatgaacgactttttcctttcttcacgcag

SEQ ID NO: 242 - DNA, 130 bp, Artificial Sequence
  Description of Artificial Sequence: Synthetic polynucleotide
gttggtatcaaggttacaagacaggtttaaggagaccaatagaaactgggcatgtggagacagagaagactcttgggtttctgataggcactgactctctctgcctattggtctattttcccacccttag

SEQ ID NO: 243 - DNA, 284 bp, Artificial Sequence
  Description of Artificial Sequence: Synthetic polynucleotide
gtaagcactttttgactattggtactctctcttccccatactcaaaaagttcttaccagttattcaaaccaacaaatcctgaagccatgtttaaggttaggtacaggtatggaatcaaatggcaagggtattaacatttggaaactaacatagctgagcatcagagaagcttgtatttttctcactccttgccttgattgaatcatataagctgttttagagttggatttgagcctacctagaatttttcttcccaacctctcatctttttttctcttatacag

SEQ ID NO: 244 - DNA, 286 bp, Artificial Sequence
  Description of Artificial Sequence: Synthetic polynucleotide
gtaagcaggtgtctattgtgctgaccactttttggtttaaaagaaatggtctttgtgtactaagaattttgatatttatcctacgtgcaataagaagctttaaataggagagttgatcattatatttgtgttttagaaatgtcattctggaatctactgaagaggatggattatatttttggaaggtgggaggcaggttggactggcataaaaattgatgagaaatccactctggttcataggtgagagagcttatactcataggattgatgtcttccctccctag

SEQ ID NO: 245 - DNA, 200 bp, Artificial Sequence
  Description of Artificial Sequence: Synthetic polynucleotide
gtaaaggcatgtcctgtagggtctgatcggggccaggattgtggggatgtaagtctgcttggaggaaggtgcagacatcgggttaggatggttgtgatgctacctgggccccaaagaaacatttctgggtaaggtgtgcacacatctgtgttattagcagaaatgctaactgccaattcttttcataggtctgacctatt

SEQ ID NO: 246 - DNA, 200 bp, Artificial Sequence
  Description of Artificial Sequence: Synthetic polynucleotide
tatgattcttatcatatggcacctaatgtatcagttgagttgtgaaaacagtgtttcggtttaatggatgttagggatttatatacaacttcaaatttgcctccttgctaatagtagaaaagagtagtatggaagcattacttccagctgctttttgaagtgtccaccaaaatgaacgactttttcctttcttcacgcag

SEQ ID NO: 247 - DNA, 9 bp, Artificial Sequence
  Description of Artificial Sequence: Synthetic oligonucleotide
aagaggttg

SEQ ID NO: 248 - DNA, 82 bp, Artificial Sequence
  Description of Artificial Sequence: Synthetic oligonucleotide
gtaagggtttaagggatggttggttggtggggtattaatgtttaattacctggagcacctgcctgaaatcactttttttcag

SEQ ID NO: 249 - DNA, 48 bp, Artificial Sequence
  Description of Artificial Sequence: Synthetic oligonucleotide
atgaagtgggtgaccttcatcagcctgctgttcagctctgcctacagt

SEQ ID NO: 250 - DNA, 48 bp, Artificial Sequence
  Description of Artificial Sequence: Synthetic oligonucleotide
atgaaatgggtaacttttatctctctattattctcaagtgcttactct

SEQ ID NO: 251 - DNA, 48 bp, Artificial Sequence
  Description of Artificial Sequence: Synthetic oligonucleotide
atgaagtgggtcacctttatatccttactcttctcctcagcatactct

SEQ ID NO: 252 - DNA, 48 bp, Artificial Sequence
  Description of Artificial Sequence: Synthetic oligonucleotide
atgcccctgctgctgctgctgcccctgctgtgggctggggccctggca

SEQ ID NO: 253 - DNA, 48 bp, Artificial Sequence
  Description of Artificial Sequence: Synthetic oligonucleotide
atgccattactgctactgttaccactactttgggctggtgcacttgct

SEQ ID NO: 254 - DNA, 48 bp, Artificial Sequence
  Description of Artificial Sequence: Synthetic oligonucleotide
atgccactattactcctcttgcctctactgtgggctggtgcactggca

SEQ ID NO: 255 - DNA, 54 bp, Artificial Sequence
  Description of Artificial Sequence: Synthetic oligonucleotide
atggccttcctgtggctgctgagctgctgggccctgctgggcaccacctttgga

SEQ ID NO: 256 - DNA, 54 bp, Artificial Sequence
  Description of Artificial Sequence: Synthetic oligonucleotide
atggcatttttatggcttttatcttgctgggcacttttaggaactacatttgga

SEQ ID NO: 257 - DNA, 54 bp, Artificial Sequence
  Description of Artificial Sequence: Synthetic oligonucleotide
atggcatttctgtggctgctgtcctgctgggctctgctgggcactacctttggg

SEQ ID NO: 258 - DNA, 51 bp, Artificial Sequence
  Description of Artificial Sequence: Synthetic oligonucleotide
atgggggtgaaggtgctgtttgccctgatctgcattgctgtggctgaggct

SEQ ID NO: 259 - DNA, 51 bp, Artificial Sequence
  Description of Artificial Sequence: Synthetic oligonucleotide
atgggtgtgaaagttctttttgccttgatttgtattgctgttgctgaagca

SEQ ID NO: 260 - DNA, 51 bp, Artificial Sequence
  Description of Artificial Sequence: Synthetic oligonucleotide
atgggggtgaaagttctgtttgctctcatctgtattgctgtggctgaagct

SEQ ID NO: 261 - DNA, 42 bp, Artificial Sequence
  Description of Artificial Sequence: Synthetic oligonucleotide
atgcagctgctgagctgcattgccctgatcctggccctggtg

SEQ ID NO: 262 - DNA, 42 bp, Artificial Sequence
  Description of Artificial Sequence: Synthetic oligonucleotide
atgcagttattatcttgtatagcattaatcttagcactagtg

SEQ ID NO: 263 - DNA, 42 bp, Artificial Sequence
  Description of Artificial Sequence: Synthetic oligonucleotide
atgcagttgctgtcttgtattgccctgattttggctctagtg

SEQ ID NO: 264 - DNA, 57 bp, Artificial Sequence
  Description of Artificial Sequence: Synthetic oligonucleotide
atgatgaggcccattgtgctggtgctgctgtttgccacctctgccctggcccaggtg

SEQ ID NO: 265 - DNA, 57 bp, Artificial Sequence
  Description of Artificial Sequence: Synthetic oligonucleotide
atgatgagaccaattgttctagtactattatttgccacctctgctcttgcccaagtg

SEQ ID NO: 266 - DNA, 57 bp, Artificial Sequence
  Description of Artificial Sequence: Synthetic oligonucleotide
atgatgaggcccattgtcctggtgcttctatttgcaacaagtgccctggcccaagta

SEQ ID NO: 267 - DNA, 63 bp, Artificial Sequence
  Description of Artificial Sequence: Synthetic oligonucleotide
atgtggtggaggctgtggtggctgctgctgctgctgctgctgctgtggcccatggtgtgggct

SEQ ID NO: 268 - DNA, 63 bp, Artificial Sequence
  Description of Artificial Sequence: Synthetic oligonucleotide
atgtggtggagattatggtggttactgttattacttttacttttatggccaatggtgtgggct

SEQ ID NO: 269 - DNA, 63 bp, Artificial Sequence
  Description of Artificial Sequence: Synthetic oligonucleotide
atgtggtggaggctgtggtggttactactgcttctgctcctgttatggccaatggtctgggct

SEQ ID NO: 270 - DNA, 66 bp, Artificial Sequence
  Description of Artificial Sequence: Synthetic oligonucleotide
atgtggtggaggctgtggtggttactactgcttctgctcctgttatggccaatggtctgggctgct

SEQ ID NO: 271 - DNA, 69 bp, Artificial Sequence
  Description of Artificial Sequence: Synthetic oligonucleotide
atggatgccatgaagagaggcctgtgctgtgtgctgctgctgtgtggagctgtgtttgtgagccccagt

SEQ ID NO: 272 - DNA, 69 bp, Artificial Sequence
  Description of Artificial Sequence: Synthetic oligonucleotide
atggatgctatgaaaagaggtttatgttgtgtgttattattgtgtggtgctgtttttgtttccccctct

SEQ ID NO: 273 - DNA, 69 bp, Artificial Sequence
  Description of Artificial Sequence: Synthetic oligonucleotide
atggatgctatgaaaagaggcctctgctgtgtgctgctcctctgtggagctgtgtttgttagccccagt

SEQ ID NO: 274 - DNA, 45 bp, Artificial Sequence
  Description of Artificial Sequence: Synthetic oligonucleotide
atgaacctgctgctgatcctgacctttgtggctgctgctgtggca

SEQ ID NO: 275 - DNA, 45 bp, Artificial Sequence
  Description of Artificial Sequence: Synthetic oligonucleotide
atgaacctgcttttgatcttgacatttgttgctgctgctgttgca

SEQ ID NO: 276 - DNA, 45 bp, Artificial Sequence
  Description of Artificial Sequence: Synthetic oligonucleotide
atgaaccttctcctgattcttacttttgtagctgctgcagtagca

SEQ ID NO: 277 - DNA, 51 bp, Artificial Sequence
  Description of Artificial Sequence: Synthetic oligonucleotide
atgatgaggcccattgtgctggtgctgctgtttgccacctctgccctggct

SEQ ID NO: 278 - DNA, 51 bp, Artificial Sequence
  Description of Artificial Sequence: Synthetic oligonucleotide
atgatgagaccaattgttctagtactattatttgccacctctgctcttgct

SEQ ID NO: 279 - DNA, 51 bp, Artificial Sequence
  Description of Artificial Sequence: Synthetic oligonucleotide
atgatgaggcccattgtcctggtgcttctatttgcaacaagtgccctggct

SEQ ID NO: 280 - DNA, 72 bp, Artificial Sequence
  Description of Artificial Sequence: Synthetic oligonucleotide
atgcccagctctgtgagctggggcatcctgctgctggctggcctgtgctgcctggtgcctgtgagcctggca

SEQ ID NO: 281 - DNA, 72 bp, Artificial Sequence
  Description of Artificial Sequence: Synthetic oligonucleotide
atgccaagttcagttagttggggaatattattacttgctggcctttgttgccttgttcctgtatctttagcc

SEQ ID NO: 282 - DNA, 72 bp, Artificial Sequence
  Description of Artificial Sequence: Synthetic oligonucleotide
atgccaagttcagtaagctgggggatccttctgctggctggtctgtgctgcctggtgccagtctctcttgct

SEQ ID NO: 283 - DNA, 225 bp, Artificial Sequence
  Description of Artificial Sequence: Synthetic polynucleotide
tgtgccttctagttgccagccatctgttgtttgcccctcccccgtgccttccttgaccctggaaggtgccactcccactgtcctttcctaataaaatgaggaaattgcatcgcattgtctgagtaggtgtcattctattctggggggtggggtggggcaggacagcaagggggaggattgggaagacaatagcaggcatgctggggatgcggtgggctctatggc

SEQ ID NO: 284 - DNA, 581 bp, Artificial Sequence
  Description of Artificial Sequence: Synthetic polynucleotide
gagcatcttaccgccatttattcccatatttgttctgtttttcttgatttgggtatacatttaaatgttaataaaacaaaatggtggggcaatcatttacatttttagggatatgtaattactagttcaggtgtattgccacaagacaaacatgttaagaaactttcccgttatttacgctctgttcctgttaatcaacctctggattacaaaatttgtgaaagattgactgatattcttaactatgttgctccttttacgctgtgtggatatgctgctttatagcctctgtatctagctattgcttcccgtacggctttcgttttctcctccttgtataaatcctggttgctgtctcttttagaggagttgtggcccgttgtccgtcaacgtggcgtggtgtgctctgtgtttgctgacgcaacccccactggctggggcattgccaccacctgtcaactcctttctgggactttcgctttccccctcccgatcgccacggcagaactcatcgccgcctgccttgcccgctgctggacaggggctaggttgctgggcactgataattccgtggtgttgtc

SEQ ID NO: 285 - DNA, 222 bp, Artificial Sequence
  Description of Artificial Sequence: Synthetic polynucleotide
cagacatgataagatacattgatgagtttggacaaaccacaactagaatgcagtgaaaaaaatgctttatttgtgaaatttgtgatgctattgctttatttgtaaccattataagctgcaataaacaagttaacaacaacaattgcattcattttatgtttcaggttcagggggagatgtgggaggttttttaaagcaagtaaaacctctacaaatgtggta

SEQ ID NO: 286 - DNA, 395 bp, Artificial Sequence
  Description of Artificial Sequence: Synthetic polynucleotide
taaaatacagcatagcaaaactttaacctccaaatcaagcctctacttgaatccttttctgagggatgaataaggcataggcatcaggggctgttgccaatgtgcattagctgtttgcagcctcaccttctttcatggagtttaagatatagtgtattttcccaaggtttgaactagctcttcatttctttatgttttaaatgcactgacctcccacattccctttttagtaaaatattcagaaataatttaaatacatcattgcaatgaaaataaatgttttttattaggcagaatccagatgctcaaggcccttcataatatcccccagtttagtagttggacttagggaacaaaggaacctttaatagaaattggacagcaagaaagcgagc

SEQ ID NO: 287 - DNA, 107 bp, Artificial Sequence
  Description of Artificial Sequence: Synthetic polynucleotide
gctcgctttcttgctgtccaatttctattaaaggttcctttgttccctaagtccaactactaaactgggggatattatgaagggccttgagcatctggattctgcct

SEQ ID NO: 288 - DNA, 395 bp, Artificial Sequence
  Description of Artificial Sequence: Synthetic polynucleotide
gctcgctttcttgctgtccaatttctattaaaggttcctttgttccctaagtccaactactaaactgggggatattatgaagggccttgagcatctggattctgcctaataaaaaacatttattttcattgcaatgatgtatttaaattatttctgaatattttactaaaaagggaatgtgggaggtcagtgcatttaaaacataaagaaatgaagagctagttcaaaccttgggaaaatacactatatcttaaactccatgaaagaaggtgaggctgcaaacagctaatgcacattggcaacagcccctgatgcctatgccttattcatccctcagaaaaggattcaagtagaggcttgatttggaggttaaagttttgctatgctgtatttta

SEQ ID NO: 289 - DNA, 107 bp, Artificial Sequence
  Description of Artificial Sequence: Synthetic polynucleotide
gcttgctttcttgctgtccaatttctattaaaggttcctttgttccctaagtccaactactaaactgggggatattatgaagggccttgagcatctggattctgcct

SEQ ID NO: 290 - DNA, 395 bp, Artificial Sequence
  Description of Artificial Sequence: Synthetic polynucleotide
gcttgctttcttgctgtccaatttctattaaaggttcctttgttccctaagtccaactactaaactgggggatattatgaagggccttgagcatctggattctgcctaataaaaaacatttattttcattgcaatgatgtatttaaattatttctgaatattttactaaaaagggaatgtgggaggtcagtgcatttaaaacataaagaaatgaagagctagttcaaaccttgggaaaatacactatatcttaaactccatgaaagaaggtgaggctgcaaacagctaatgcacattggcaacagcccctgatgcctatgccttattcatccctcagaaaaggattcaagtagaggcttgatttggaggttaaagttttgctatgctgtatttta

SEQ ID NO: 291 - DNA, 395 bp, Artificial Sequence
  Description of Artificial Sequence: Synthetic polynucleotide
taaaatacagcatagcaaaactttaacctccaaatcaagcctctacttgaatccttttctgagggatgaataaggcataggcatcaggggctgttgccaatgtgcattagctgtttgcagcctcaccttctttcatggagtttaagatatagtgtattttcccaaggtttgaactagctcttcatttctttatgttttaaatgcactgacctcccacattccctttttagtaaaatattcagaaataatttaaatacatcattgcaatgaaaataaatgttttttattaggcagaatccagatgctcaaggcccttcataatatcccccagtttagtagttggacttagggaacaaaggaacctttaatagaaattggacagcaagaaagcaagc

SEQ ID NO: 292 - DNA, 674 bp, Artificial Sequence
  Description of Artificial Sequence: Synthetic polynucleotide
gggaggtggtccctgcagttacgccaatgataacccccgccagaaaaatcttagtagccttccctttttgttttccgtgccccaactcggcggattgactcggccccttccggaaacacccgaatcaacttctagtcaaattattgttcacgccgcaatgacccacccctggcccgcgtctgtggaactgacccctggtgtacaggagagttcgctgctgaaagtggtcccaaaggggtactagtttttaagctcccaactccccctcccccagcgtctggaggattccacaccctcgcaccgcaggggcgaggaagtgggcggagtccggttttggcgccagccgctgaggctgccaagcagaaaagccaccgctgaggagactccggtcactgtcctcgccccgcctcccccttccctccccttggggaccaccgggcgccacgccgcgaacgttaagtgccgcggtcgtcggcgcctccgccctcccccttgggccccaattcccagcgggcgcggcgcgcggcccctccccccgccgggcgcgcgcccgctgccccgcccttcgtggccgcccggcgtgggcggtgccacccctccccccggcggccccgcgcgcagctcccggctccctcccccttcggatgtggcttgagctgtaggcgcggagggcc

SEQ ID NO: 293 - DNA, 143 bp, Artificial Sequence
  Description of Artificial Sequence: Synthetic polynucleotide
atgcaaattgagttatccacctgtttcttcctctgtctcctgaggttctgcttctctgccaccaggagatactacctgggggctgtggagctgtcctgggactacatgcaaagtgatctgggtgagctgcctgtggatgcaag

SEQ ID NO: 294 - DNA, 4249 bp, Artificial Sequence
  Description of Artificial Sequence: Synthetic polynucleotide
atttcctcctagagtgccaaaatcttttccattcaacacctcagtggtgtacaaaaagaccctgtttgtggagttcacagaccacctgttcaacatagccaagcccaggcccccctggatgggcctgctgggccccaccatccaggcagaggtttatgacacagtggtcatcaccctgaagaacatggcctcccaccctgtgtccctccatgctgtgggggtgagctactggaaggccagtgagggggcagaatatgatgaccagaccagccagagggagaaggaggatgacaaggtgttcccagggggcagccacacctatgtgtggcaggtcctgaaggagaatggccccatggcctctgaccccctctgcctcacctactcctacctgtcccatgtggacctggtgaaggacctcaactctggcctgattggagccctcctggtgtgcagggaggggagcctggccaaggaaaagacccagaccctgcacaagtttatcctgctctttgcagtctttgatgaggggaagtcctggcacagtgagaccaagaactccctgatgcaggacagagatgctgcctcagccagggcctggcccaagatgcacacagtgaatgggtatgtcaacaggagcctgccaggcctgattgggtgccacagaaagtcagtgtactggcatgtcattggcatgggcaccaccccagaggtgcactccatcttcctggagggccacaccttcctggtgaggaaccacagacaggccagcctggagatcagcccaatcaccttcctcacagcccagaccctcctcatggacctgggccagtttctcctgagctgccacatctcctcccaccagcatgatggcatggaggcctatgtgaaggtggacagctgccctgaggagccccagctcaggatgaagaacaatgaggaggcagaggactatgatgatgatctgacagactctgagatggatgtggtgagatttgatgatgacaacagcccctccttcatccagatcaggtctgtggccaagaagcaccctaagacctgggtgcactacattgcagctgaggaggaggactgggactatgcccccctggtcctggcccctgatgataggtcctacaagtcccagtacctgaacaatggcccccagaggatagggagaaagtacaagaaggtgaggttcatggcctacactgatgagaccttcaagactagggaagccatccagcatgagtctgggatcctgggccccctcctctatggggaggtgggggacaccctgctgatcatcttcaagaaccaggccagcaggccctacaacatttacccccatgggatcacagatgtgagacccctgtacagcaggagactgccaaagggggtgaagcacctgaaggacttccccatcctgccaggggagatcttcaagtacaagtggactgtgacagtggaggatgggcccaccaaatctgaccctagatgcctgaccagatactacagcagctttgtgaacatggagagggacctggcctctggactgattggccctctgctgatctgctacaaggagagtgtggaccagaggggaaaccagatcatgtctgacaagaggaatgtgatcctgttctcagtgtttgatgagaacagatcctggtacctcactgagaacatccagaggttcctgcccaacccagcaggggtgcagctggaggacccagagttccaggcctccaacatcatgcactccatcaatggctatgtctttgactccctgcagctgtcagtgtgcctgcatgaggtggcctactggtacatcctctccattggagcccagactgacttcctgtcagtcttcttcagtggctacaccttcaagcacaagatggtctatgaggacactctgaccctgttccccttctctggggagactgtgttcatgtccatggagaaccctggactgtggatcctgggctgccacaacagtgacttcaggaacaggggcatgactgccctgctgaaggtctccagctgtgacaagaacactggggactactatgaggactcctatgaggacatctctgcctacctgctgtccaagaacaatgccattgagcccaggtccttctcccagaacagcagacacccctccaccaggcagaagcagttcaatgcaaccaccatccctgaaaataccaccctgcagagtgaccaggaggagattgactatgatgacaccatctctgtggagatgaagaaggaggactttgacatctatgatgaggatgagaaccagagccctagaagcttccagaagaagaccagacactacttcattgctgcagtggaaagactgtgggactatgggatgagctcctccccccatgtgctgaggaacagggcccagtctggctctgtgccccagttcaagaaggtggtgttccaggagttcactgatggctccttcacccagcccctgtacaggggagagctgaatgagcacctgggcctgctgggcccctacatcagggctgaggtggaggacaatatcatggtgaccttcagaaaccaggcctccagaccttactccttctacagcagcctgatctcctatgaggaggaccagagacagggggctgagcccaggaagaactttgtgaagcccaatgagaccaagacctacttctggaaggtgcagcaccacatggcccccaccaaggatgagtttgactgcaaggcctgggcctacttctctgatgtggacctggagaaggatgtgcactctggcctgattggccccctgctggtgtgccacaccaacaccctgaaccctgcccatggcaggcaggtgactgtgcaggagtttgccctgttcttcaccatctttgatgagaccaagagctggtacttcactgagaacatggagaggaactgcagggccccctgcaacatccagatggaggaccccaccttcaaggagaactacaggttccatgccatcaatggctacatcatggacaccctgcctggcctggtgatggcccaggaccagaggatcaggtggtacctgctgagcatggggagcaatgagaacatccacagcatccacttctctggccatgtgttcacagtgaggaagaaggaggagtacaagatggccctgtacaacctgtaccctggggtgtttgagacagtggagatgctgccctccaaggctggaatctggagggtggagtgcctgattggggagcacctgcatgctggcatgagcaccctgttcctggtgtacagcaacaagtgccagacccccctgggcatggcctctggccacatcagagacttccagatcacagcctcaggccagtatggccagtgggcccccaagctggccaggctgcactactctggcagcatcaatgcctggtccaccaaggagcccttcagctggatcaaggtggacctcctggcccccatgatcatccatggcatcaagacccagggggccaggcagaagttcagctccctgtacatctcccagttcatcatcatgtactccctggatggcaagaagtggcagacctacagaggcaacagcacaggcaccctgatggtgttctttggcaatgtggacagctctgggatcaagcacaacatcttcaacccccccatcattgccaggtacatcagactgcaccccacccactactccatcaggtccaccctgagaatggagctgatgggctgtgacctgaacagctgcagcatgcccctgggcatggagagcaaggccatctctgatgcccagatcacagccagcagctacttcaccaacatgtttgccacctggtcccccagcaaggccaggctgcacctgcagggcaggagcaatgcctggaggccccaggtgaacaaccccaaggagtggctgcaggtggacttccagaagaccatgaaggtgacaggggtgaccacccagggggtgaagtccctgctgaccagcatgtatgtgaaggagttcctgatcagcagctcccaggatggccaccagtggaccctgttcttccagaatggcaaggtgaaggtgttccagggcaaccaggacagcttcacccctgtggtgaactccctggacccccccctgctgaccagatacctgaggatccacccccagtcctgggtgcaccagattgccctgagaatggaggtgctgggctgtgaggcccaggacctgtactga

SEQ ID NO: 295 - DNA, 143 bp, Artificial Sequence
  Description of Artificial Sequence: Synthetic polynucleotide
atgcagattgagctgagcacctgcttcttcctgtgcctgctgaggttctgcttctctgccaccaggagatactacctgggggctgtggagctgagctgggactacatgcaaagtgatctgggtgagctgcctgtggatgcaag

SEQ ID NO: 296 - DNA, 4249 bp, Artificial Sequence
  Description of Artificial Sequence: Synthetic polynucleotide
atttcctcctagagtgccaaaatcttttccattcaacacctctgtggtgtacaagaagaccctgtttgtggagttcactgaccacctgttcaacattgccaagcccaggcccccctggatgggcctgctgggccccaccatccaggctgaggtgtatgacactgtggtgatcaccctgaagaacatggccagccaccctgtgagcctgcatgctgtgggggtgagctactggaaggcctctgagggggctgagtatgatgaccagaccagccagagggagaaggaggatgacaaggtgttccctgggggcagccacacctatgtgtggcaggtgctgaaggagaatggccccatggcctctgaccccctgtgcctgacctacagctacctgagccatgtggacctggtgaaggacctgaactctggcctgattggggccctgctggtgtgcagggagggcagcctggccaaggagaagacccagaccctgcacaagttcatcctgctgtttgctgtgtttgatgagggcaagagctggcactctgaaaccaagaacagcctgatgcaggacagggatgctgcctctgccagggcctggcccaagatgcacactgtgaatggctatgtgaacaggagcctgcctggcctgattggctgccacaggaagtctgtgtactggcatgtgattggcatgggcaccacccctgaggtgcacagcatcttcctggagggccacaccttcctggtcaggaaccacaggcaggccagcctggagatcagccccatcaccttcctgactgcccagaccctgctgatggacctgggccagttcctgctgagctgccacatcagcagccaccagcatgatggcatggaggcctatgtgaaggtggacagctgccctgaggagccccagctgaggatgaagaacaatgaggaggctgaggactatgatgatgacctgactgactctgagatggatgtggtgaggtttgatgatgacaacagccccagcttcatccagatcaggtctgtggccaagaagcaccccaagacctgggtgcactacattgctgctgaggaggaggactgggactatgcccccctggtgctggcccctgatgacaggagctacaagagccagtacctgaacaatggcccccagaggattggcaggaagtacaagaaggtcaggttcatggcctacactgatgaaaccttcaagaccagggaggccatccagcatgagtctggcatcctgggccccctgctgtatggggaggtgggggacaccctgctgatcatcttcaagaaccaggccagcaggccctacaacatctacccccatggcatcactgatgtgaggcccctgtacagcaggaggctgcccaagggggtgaagcacctgaaggacttccccatcctgcctggggagatcttcaagtacaagtggactgtgactgtggaggatggccccaccaagtctgaccccaggtgcctgaccagatactacagcagctttgtgaacatggagagggacctggcctctggcctgattggccccctgctgatctgctacaaggagtctgtggaccagaggggcaaccagatcatgtctgacaagaggaatgtgatcctgttctctgtgtttgatgagaacaggagctggtacctgactgagaacatccagaggttcctgcccaaccctgctggggtgcagctggaggaccctgagttccaggccagcaacatcatgcacagcatcaatggctatgtgtttgacagcctgcagctgtctgtgtgcctgcatgaggtggcctactggtacatcctgagcattggggcccagactgacttcctgtctgtgttcttctctggctacaccttcaagcacaagatggtgtatgaggacaccctgaccctgttccccttctctggggagactgtgttcatgagcatggagaaccctggcctgtggattctgggctgccacaactctgacttcaggaacaggggcatgactgccctgctgaaagtctccagctgtgacaagaacactggggactactatgaggacagctatgaggacatctctgcctacctgctgagcaagaacaatgccattgagcccaggagcttcagccagaatagcaggcaccccagcaccaggcagaagcagttcaatgccaccaccatcccagagaataccaccctgcagtctgaccaggaggagattgactatgatgacaccatctctgtggagatgaagaaggaggactttgacatctacgacgaggacgagaaccagagccccaggagcttccagaagaagaccaggcactacttcattgctgctgtggagaggctgtgggactatggcatgagcagcagcccccatgtgctgaggaacagggcccagtctggctctgtgccccagttcaagaaggtggtgttccaggagttcactgatggcagcttcacccagcccctgtacagaggggagctgaatgagcacctgggcctgctgggcccctacatcagggctgaggtggaggacaacatcatggtgaccttcaggaaccaggccagcaggccctacagcttctacagcagcctgatcagctatgaggaggaccagaggcagggggctgagcccaggaagaactttgtgaagcccaatgaaaccaagacctacttctggaaggtgcagcaccacatggcccccaccaaggatgagtttgactgcaaggcctgggcctacttctctgatgtggacctggagaaggatgtgcactctggcctgattggccccctgctggtgtgccacaccaacaccctgaaccctgcccatggcaggcaggtgactgtgcaggagtttgccctgttcttcaccatctttgatgaaaccaagagctggtacttcactgagaacatggagaggaactgcagggccccctgcaacatccagatggaggaccccaccttcaaggagaactacaggttccatgccatcaatggctacatcatggacaccctgcctggcctggtgatggcccaggaccagaggatcaggtggtacctgctgagcatgggcagcaatgagaacatccacagcatccacttctctggccatgtgttcactgtgaggaagaaggaggagtacaagatggccctgtacaacctgtaccctggggtgtttgagactgtggagatgctgcccagcaaggctggcatctggagggtggagtgcctgattggggagcacctgcatgctggcatgagcaccctgttcctggtgtacagcaacaagtgccagacccccctgggcatggcctctggccacatcagggacttccagatcactgcctctggccagtatggccagtgggcccccaagctggccaggctgcactactctggcagcatcaatgcctggagcaccaaggagcccttcagctggatcaaggtggacctgctggcccccatgatcatccatggcatcaagacccagggggccaggcagaagttcagcagcctgtacatcagccagttcatcatcatgtacagcctggatggcaagaagtggcagacctacaggggcaacagcactggcaccctgatggtgttctttggcaatgtggacagctctggcatcaagcacaacatcttcaacccccccatcattgccagatacatcaggctgcaccccacccactacagcatcaggagcaccctgaggatggagctgatgggctgtgacctgaacagctgcagcatgcccctgggcatggagagcaaggccatctctgatgcccagatcactgccagcagctacttcaccaacatgtttgccacctggagccccagcaaggccaggctgcacctgcagggcaggagcaatgcctggaggccccaggtcaacaaccccaaggagtggctgcaggtggacttccagaagaccatgaaggtgactggggtgaccacccagggggtgaagagcctgctgaccagcatgtatgtgaaggagttcctgatcagcagcagccaggatggccaccagtggaccctgttcttccagaatggcaaggtgaaggtgttccagggcaaccaggacagcttcacccctgtggtgaacagcctggacccccccctgctgaccagatacctgaggattcacccccagagctgggtgcaccagattgccctgaggatggaggtgctgggctgtgaggcccaggacctgtactga

SEQ ID NO: 297 - DNA, 143 bp, Artificial Sequence
  Description of Artificial Sequence: Synthetic polynucleotide
atgcaaattgagttatccacctgtttcttcctctgtctcctgaggttctgcttctctgccaccaggagatactacctgggggctgtggagctgtcctgggactacatgcagtcagacctgggggagctgccagttgatgccag

SEQ ID NO: 298 - DNA, 4249 bp, Artificial Sequence
  Description of Artificial Sequence: Synthetic polynucleotide
gttcccccccagagtccccaagtccttccccttcaacacctcagtggtgtacaaaaagaccctgtttgtggagttcacagaccacctgttcaacatagccaagcccaggcccccctggatgggcctgctgggccccaccatccaggcagaggtttatgacacagtggtcatcaccctgaagaacatggcctcccaccctgtgtccctccatgctgtgggggtgagctactggaaggccagtgagggggcagaatatgatgaccagaccagccagagggagaaggaggatgacaaggtgttcccagggggcagccacacctatgtgtggcaggtcctgaaggagaatggccccatggcctctgaccccctctgcctcacctactcctacctgtcccatgtggacctggtgaaggacctcaactctggcctgattggagccctcctggtgtgcagggaggggagcctggccaaggaaaagacccagaccctgcacaagtttatcctgctctttgcagtctttgatgaggggaagtcctggcacagtgagaccaagaactccctgatgcaggacagagatgctgcctcagccagggcctggcccaagatgcacacagtgaatgggtatgtcaacaggagcctgccaggcctgattgggtgccacagaaagtcagtgtactggcatgtcattggcatgggcaccaccccagaggtgcactccatcttcctggagggccacaccttcctggtgaggaaccacagacaggccagcctggagatcagcccaatcaccttcctcacagcccagaccctcctcatggacctgggccagtttctcctgagctgccacatctcctcccaccagcatgatggcatggaggcctatgtgaaggtggacagctgccctgaggagccccagctcaggatgaagaacaatgaggaggcagaggactatgatgatgatctgacagactctgagatggatgtggtgagatttgatgatgacaacagcccctccttcatccagatcaggtctgtggccaagaagcaccctaagacctgggtgcactacattgcagctgaggaggaggactgggactatgcccccctggtcctggcccctgatgataggtcctacaagtcccagtacctgaacaatggcccccagaggatagggagaaagtacaagaaggtgaggttcatggcctacactgatgagaccttcaagactagggaagccatccagcatgagtctgggatcctgggccccctcctctatggggaggtgggggacaccctgctgatcatcttcaagaaccaggccagcaggccctacaacatttacccccatgggatcacagatgtgagacccctgtacagcaggagactgccaaagggggtgaagcacctgaaggacttccccatcctgccaggggagatcttcaagtacaagtggactgtgacagtggaggatgggcccaccaaatctgaccctagatgcctgaccagatactacagcagctttgtgaacatggagagggacctggcctctggactgattggccctctgctgatctgctacaaggagagtgtggaccagaggggaaaccagatcatgtctgacaagaggaatgtgatcctgttctcagtgtttgatgagaacagatcctggtacctcactgagaacatccagaggttcctgcccaacccagcaggggtgcagctggaggacccagagttccaggcctccaacatcatgcactccatcaatggctatgtctttgactccctgcagctgtcagtgtgcctgcatgaggtggcctactggtacatcctctccattggagcccagactgacttcctgtcagtcttcttcagtggctacaccttcaagcacaagatggtctatgaggacactctgaccctgttccccttctctggggagactgtgttcatgtccatggagaaccctggactgtggatcctgggctgccacaacagtgacttcaggaacaggggcatgactgccctgctgaaggtctccagctgtgacaagaacactggggactactatgaggactcctatgaggacatctctgcctacctgctgtccaagaacaatgccattgagcccaggtccttctcccagaacagcagacacccctccaccaggcagaagcagttcaatgcaaccaccatccctgaaaataccaccctgcagagtgaccaggaggagattgactatgatgacaccatctctgtggagatgaagaaggaggactttgacatctatgatgaggatgagaaccagagccctagaagcttccagaagaagaccagacactacttcattgctgcagtggaaagactgtgggactatgggatgagctcctccccccatgtgctgaggaacagggcccagtctggctctgtgccccagttcaagaaggtggtgttccaggagttcactgatggctccttcacccagcccctgtacaggggagagctgaatgagcacctgggcctgctgggcccctacatcagggctgaggtggaggacaatatcatggtgaccttcagaaaccaggcctccagaccttactccttctacagcagcctgatctcctatgaggaggaccagagacagggggctgagcccaggaagaactttgtgaagcccaatgagaccaagacctacttctggaaggtgcagcaccacatggcccccaccaaggatgagtttgactgcaaggcctgggcctacttctctgatgtggacctggagaaggatgtgcactctggcctgattggccccctgctggtgtgccacaccaacaccctgaaccctgcccatggcaggcaggtgactgtgcaggagtttgccctgttcttcaccatctttgatgagaccaagagctggtacttcactgagaacatggagaggaactgcagggccccctgcaacatccagatggaggaccccaccttcaaggagaactacaggttccatgccatcaatggctacatcatggacaccctgcctggcctggtgatggcccaggaccagaggatcaggtggtacctgctgagcatggggagcaatgagaacatccacagcatccacttctctggccatgtgttcacagtgaggaagaaggaggagtacaagatggccctgtacaacctgtaccctggggtgtttgagacagtggagatgctgccctccaaggctggaatctggagggtggagtgcctgattggggagcacctgcatgctggcatgagcaccctgttcctggtgtacagcaacaagtgccagacccccctgggcatggcctctggccacatcagagacttccagatcacagcctcaggccagtatggccagtgggcccccaagctggccaggctgcactactctggcagcatcaatgcctggtccaccaaggagcccttcagctggatcaaggtggacctcctggcccccatgatcatccatggcatcaagacccagggggccaggcagaagttcagctccctgtacatctcccagttcatcatcatgtactccctggatggcaagaagtggcagacctacagaggcaacagcacaggcaccctgatggtgttctttggcaatgtggacagctctgggatcaagcacaacatcttcaacccccccatcattgccaggtacatcagactgcaccccacccactactccatcaggtccaccctgagaatggagctgatgggctgtgacctgaacagctgcagcatgcccctgggcatggagagcaaggccatctctgatgcccagatcacagccagcagctacttcaccaacatgtttgccacctggtcccccagcaaggccaggctgcacctgcagggcaggagcaatgcctggaggccccaggtgaacaaccccaaggagtggctgcaggtggacttccagaagaccatgaaggtgacaggggtgaccacccagggggtgaagtccctgctgaccagcatgtatgtgaaggagttcctgatcagcagctcccaggatggccaccagtggaccctgttcttccagaatggcaaggtgaaggtgttccagggcaaccaggacagcttcacccctgtggtgaactccctggacccccccctgctgaccagatacctgaggatccacccccagtcctgggtgcaccagattgccctgagaatggaggtgctgggctgtgaggcccaggacctgtactga

SEQ ID NO: 299 - DNA, 143 bp, Artificial Sequence
  Description of Artificial Sequence: Synthetic polynucleotide
atgcagattgagctgagcacctgcttcttcctgtgcctgctgaggttctgcttctctgccaccaggagatactacctgggggctgtggagctgagctgggactacatgcagtctgacctgggggagctgcctgtggatgccag

SEQ ID NO: 300 - DNA, 4249 bp, Artificial Sequence
  Description of Artificial Sequence: Synthetic polynucleotide
gttcccccccagagtgcccaagagcttccccttcaacacctctgtggtgtacaagaagaccctgtttgtggagttcactgaccacctgttcaacattgccaagcccaggcccccctggatgggcctgctgggccccaccatccaggctgaggtgtatgacactgtggtgatcaccctgaagaacatggccagccaccctgtgagcctgcatgctgtgggggtgagctactggaaggcctctgagggggctgagtatgatgaccagaccagccagagggagaaggaggatgacaaggtgttccctgggggcagccacacctatgtgtggcaggtgctgaaggagaatggccccatggcctctgaccccctgtgcctgacctacagctacctgagccatgtggacctggtgaaggacctgaactctggcctgattggggccctgctggtgtgcagggagggcagcctggccaaggagaagacccagaccctgcacaagttcatcctgctgtttgctgtgtttgatgagggcaagagctggcactctgaaaccaagaacagcctgatgcaggacagggatgctgcctctgccagggcctggcccaagatgcacactgtgaatggctatgtgaacaggagcctgcctggcctgattggctgccacaggaagtctgtgtactggcatgtgattggcatgggcaccacccctgaggtgcacagcatcttcctggagggccacaccttcctggtcaggaaccacaggcaggccagcctggagatcagccccatcaccttcctgactgcccagaccctgctgatggacctgggccagttcctgctgagctgccacatcagcagccaccagcatgatggcatggaggcctatgtgaaggtggacagctgccctgaggagccccagctgaggatgaagaacaatgaggaggctgaggactatgatgatgacctgactgactctgagatggatgtggtgaggtttgatgatgacaacagccccagcttcatccagatcaggtctgtggccaagaagcaccccaagacctgggtgcactacattgctgctgaggaggaggactgggactatgcccccctggtgctggcccctgatgacaggagctacaagagccagtacctgaacaatggcccccagaggattggcaggaagtacaagaaggtcaggttcatggcctacactgatgaaaccttcaagaccagggaggccatccagcatgagtctggcatcctgggccccctgctgtatggggaggtgggggacaccctgctgatcatcttcaagaaccaggccagcaggccctacaacatctacccccatggcatcactgatgtgaggcccctgtacagcaggaggctgcccaagggggtgaagcacctgaaggacttccccatcctgcctggggagatcttcaagtacaagtggactgtgactgtggaggatggccccaccaagtctgaccccaggtgcctgaccagatactacagcagctttgtgaacatggagagggacctggcctctggcctgattggccccctgctgatctgctacaaggagtctgtggaccagaggggcaaccagatcatgtctgacaagaggaatgtgatcctgttctctgtgtttgatgagaacaggagctggtacctgactgagaacatccagaggttcctgcccaaccctgctggggtgcagctggaggaccctgagttccaggccagcaacatcatgcacagcatcaatggctatgtgtttgacagcctgcagctgtctgtgtgcctgcatgaggtggcctactggtacatcctgagcattggggcccagactgacttcctgtctgtgttcttctctggctacaccttcaagcacaagatggtgtatgaggacaccctgaccctgttccccttctctggggagactgtgttcatgagcatggagaaccctggcctgtggattctgggctgccacaactctgacttcaggaacaggggcatgactgccctgctgaaagtctccagctgtgacaagaacactggggactactatgaggacagctatgaggacatctctgcctacctgctgagcaagaacaatgccattgagcccaggagcttcagccagaatagcaggcaccccagcaccaggcagaagcagttcaatgccaccaccatcccagagaataccaccctgcagtctgaccaggaggagattgactatgatgacaccatctctgtggagatgaagaaggaggactttgacatctacgacgaggacgagaaccagagccccaggagcttccagaagaagaccaggcactacttcattgctgctgtggagaggctgtgggactatggcatgagcagcagcccccatgtgctgaggaacagggcccagtctggctctgtgccccagttcaagaaggtggtgttccaggagttcactgatggcagcttcacccagcccctgtacagaggggagctgaatgagcacctgggcctgctgggcccctacatcagggctgaggtggaggacaacatcatggtgaccttcaggaaccaggccagcaggccctacagcttctacagcagcctgatcagctatgaggaggaccagaggcagggggctgagcccaggaagaactttgtgaagcccaatgaaaccaagacctacttctggaaggtgcagcaccacatggcccccaccaaggatgagtttgactgcaaggcctgggcctacttctctgatgtggacctggagaaggatgtgcactctggcctgattggccccctgctggtgtgccacaccaacaccctgaaccctgcccatggcaggcaggtgactgtgcaggagtttgccctgttcttcaccatctttgatgaaaccaagagctggtacttcactgagaacatggagaggaactgcagggccccctgcaacatccagatggaggaccccaccttcaaggagaactacaggttccatgccatcaatggctacatcatggacaccctgcctggcctggtgatggcccaggaccagaggatcaggtggtacctgctgagcatgggcagcaatgagaacatccacagcatccacttctctggccatgtgttcactgtgaggaagaaggaggagtacaagatggccctgtacaacctgtaccctggggtgtttgagactgtggagatgctgcccagcaaggctggcatctggagggtggagtgcctgattggggagcacctgcatgctggcatgagcaccctgttcctggtgtacagcaacaagtgccagacccccctgggcatggcctctggccacatcagggacttccagatcactgcctctggccagtatggccagtgggcccccaagctggccaggctgcactactctggcagcatcaatgcctggagcaccaaggagcccttcagctggatcaaggtggacctgctggcccccatgatcatccatggcatcaagacccagggggccaggcagaagttcagcagcctgtacatcagccagttcatcatcatgtacagcctggatggcaagaagtggcagacctacaggggcaacagcactggcaccctgatggtgttctttggcaatgtggacagctctggcatcaagcacaacatcttcaacccccccatcattgccagatacatcaggctgcaccccacccactacagcatcaggagcaccctgaggatggagctgatgggctgtgacctgaacagctgcagcatgcccctgggcatggagagcaaggccatctctgatgcccagatcactgccagcagctacttcaccaacatgtttgccacctggagccccagcaaggccaggctgcacctgcagggcaggagcaatgcctggaggccccaggtcaacaaccccaaggagtggctgcaggtggacttccagaagaccatgaaggtgactggggtgaccacccagggggtgaagagcctgctgaccagcatgtatgtgaaggagttcctgatcagcagcagccaggatggccaccagtggaccctgttcttccagaatggcaaggtgaaggtgttccagggcaaccaggacagcttcacccctgtggtgaacagcctggacccccccctgctgaccagatacctgaggattcacccccagagctgggtgcaccagattgccctgaggatggaggtgctgggctgtgaggcccaggacctgtactga

SEQ ID NO: 301 - DNA, 33 bp, Artificial Sequence
  Description of Artificial Sequence: Synthetic oligonucleotide
atttcctcctagagtgccaaaatcttttccatt

SEQ ID NO: 302 - DNA, 33 bp, Artificial Sequence
  Description of Artificial Sequence: Synthetic oligonucleotide
aagtgatctgggtgagctgcctgtggatgcaag

SEQ ID NO: 303 - DNA, 46 bp, Artificial Sequence
  Description of Artificial Sequence: Synthetic oligonucleotide
ctggggactttccagctggggactttccagctggggactttccagg

SEQ ID NO: 304 - DNA, 21 bp, Artificial Sequence
  Description of Artificial Sequence: Synthetic oligonucleotide
aggattagtcccccagtgcac

SEQ ID NO: 305 - DNA, 23 bp, Artificial Sequence
  Description of Artificial Sequence: Synthetic oligonucleotide
agcctgcacttagagtgtctagg

SEQ ID NO: 306 - DNA, 70 bp, Artificial Sequence
  Description of Artificial Sequence: Synthetic oligonucleotide
tggggactttccgctggggactttccgctggggactttccgctggggactttccgctggggactttccgc

SEQ ID NO: 307 - DNA, 60 bp, Artificial Sequence
  Description of Artificial Sequence: Synthetic oligonucleotide
acgggtggtacagaatgttcttttggcgtcgacacgggtggtacagaatgttcttttggc

SEQ ID NO: 308 - DNA, 15 bp, Artificial Sequence
  Description of Artificial Sequence: Synthetic oligonucleotide
tgacgtcaagatcta

SEQ ID NO: 309 - DNA, 840 bp, Artificial Sequence
  Description of Artificial Sequence: Synthetic polynucleotide
aacaggttagtttgactagctggttgctgactaattgagatgcatgctttgcatacttctgcctgctggggagcctggggactttccacacctggttgctgactaattgagatgcatgctttgcatacttctgcctgctggggagcctggggactttccacaccttaagaatgtaaattctgggtggttgctgactaattgagatgcatgctttgcatacttctgcctgctggggagcctggggactttccacacctggttgctgactaattgagatgcatgctttgcatacttctgcctgctggggagcctggggactttccacacctagttacctaatttgttagatggttgctgactaattgagatgcatgctttgcatacttctgcctgctggggagcctggggactttccacacctggttgctgactaattgagatgcatgctttgcatacttctgcctgctggggagcctggggactttccacaccaatggcactcaaacagtatgtggttgctgactaattgagatgcatgctttgcatacttctgcctgctggggagcctggggactttccacacctggttgctgactaattgagatgcatgctttgcatacttctgcctgctggggagcctggggactttccacaccacttttagtcagaggttaattggttgctgactaattgagatgcatgctttgcatacttctgcctgctggggagcctggggactttccacacctggttgctgactaattgagatgcatgctttgcatacttctgcctgctggggagcctggggactttccacaccttggctcctaggtcatgcac

SEQ ID NO: 310 - DNA, 60 bp, Artificial Sequence
  Description of Artificial Sequence: Synthetic oligonucleotide
acgggaagaacattttgtacgtttggcgtcgacacgggaagaacattttgtacgtttggc

SEQ ID NO: 311 - DNA, 72 bp, Artificial Sequence
  Description of Artificial Sequence: Synthetic oligonucleotide
tggttgctgactaattgagatgcatgctttgcatacttctgcctgctggggagcctggggactttccacacc

SEQ ID NO: 312 - DNA, 144 bp, Artificial Sequence
  Description of Artificial Sequence: Synthetic polynucleotide
tggttgctgactaattgagatgcatgctttgcatacttctgcctgctggggagcctggggactttccacacctggttgctgactaattgagatgcatgctttgcatacttctgcctgctggggagcctggggactttccacacc

SEQ ID NO: 313 - DNA, 840 bp, Artificial Sequence
  Description of Artificial Sequence: Synthetic polynucleotide
aacaggttagtttgactagctggttgctgactaattgagatgcatgctttgcatacttctgcctgctggggagcctggggactttccacacctggttgctgactaattgagatgcatgctttgcatacttctgcctgctggggagcctggggactttccacaccttaagaatgtaaattctgggtggttgctgactaattgagatgcatgctttgcatacttctgcctgctggggagcctggggactttccacacctggttgctgactaattgagatgcatgctttgcatacttctgcctgctggggagcctggggactttccacacctagttacctaatttgttagatggttgctgactaattgagatgcatgctttgcatacttctgcctgctggggagcctggggactttccacacctggttgctgactaattgagatgcatgctttgcatacttctgcctgctggggagcctggggactttccacaccaatggcactcaaacagtatgtggttgctgactaattgagatgcatgctttgcatacttctgcctgctggggagcctggggactttccacacctggttgctgactaattgagatgcatgctttgcatacttctgcctgctggggagcctggggactttccacaccacttttagtcagaggttaattggttgctgactaattgagatgcatgctttgcatacttctgcctgctggggagcctggggactttccacacctggttgctgactaattgagatgcatgctttgcatacttctgcctgctggggagcctggggactttccacaccttggctcctagatcatgcac

SEQ ID NO: 314 - DNA, 9 bp, Artificial Sequence
  Description of Artificial Sequence: Synthetic oligonucleotide
gccgccacc

SEQ ID NO: 315 - DNA, 7 bp, Artificial Sequence
  Description of Artificial Sequence: Synthetic oligonucleotide
agccacc

SEQ ID NO: 316 - DNA, 10 bp, Artificial Sequence
  Description of Artificial Sequence: Synthetic oligonucleotide
cgcagccacc

SEQ ID NO: 317 - DNA, 3 bp, Artificial Sequence
  Description of Artificial Sequence: Synthetic oligonucleotide
acc

SEQ ID NO: 318 - DNA, 53 bp, Artificial Sequence
  Description of Artificial Sequence: Synthetic oligonucleotide
tgtagttaatgattaacccgccatgctacttatctacgtagccatgctctaga

SEQ ID NO: 319 - DNA, 42 bp, Artificial Sequence
  Description of Artificial Sequence: Synthetic oligonucleotide
tgtagttaatgattaacccgccatgctacttatcgcggccgc

SEQ ID NO: 320 - DNA, 61 bp, Artificial Sequence
  Description of Artificial Sequence: Synthetic oligonucleotide
tctagagcatggctacgtagataagtagcatggcgggttaatcattaactacacctgcagg

SEQ ID NO: 321 - DNA, 20 bp, Artificial Sequence
  Description of Artificial Sequence: Synthetic oligonucleotide
aacaggttagtttgactagc

SEQ ID NO: 322 - DNA, 20 bp, Artificial Sequence
  Description of Artificial Sequence: Synthetic oligonucleotide
ttaagaatgtaaattctggg

SEQ ID NO: 323 - DNA, 20 bp, Artificial Sequence
  Description of Artificial Sequence: Synthetic oligonucleotide
tagttacctaatttgttaga

SEQ ID NO: 324 - DNA, 20 bp, Artificial Sequence
  Description of Artificial Sequence: Synthetic oligonucleotide
aatggcactcaaacagtatg

SEQ ID NO: 325 - DNA, 20 bp, Artificial Sequence
  Description of Artificial Sequence: Synthetic oligonucleotide
acttttagtcagaggttaat

SEQ ID NO: 326 - DNA, 20 bp, Artificial Sequence
  Description of Artificial Sequence: Synthetic oligonucleotide
ttggctcctaggtcatgcac

SEQ ID NO: 327 - DNA, 20 bp, Artificial Sequence
  Description of Artificial Sequence: Synthetic oligonucleotide
ttggctcctagatcatgcac

SEQ ID NO: 328 - DNA, 100 bp, Artificial Sequence
  Description of Artificial Sequence: Synthetic polynucleotide
tcccttgccaatagccggtttaacttgctataattaattcattggtataaactataaacattccaattgagataggggagaaatctagtaatcttctaag

SEQ ID NO: 329 - DNA, 800 bp, Artificial Sequence
  Description of Artificial Sequence: Synthetic polynucleotide
ctgtctagctcctcttctgtcattgcaacctctgtaagggttttagttctccttattttttatgtcttgctctggtagtgctgacagaagcataatagtaagagtactgtggatgtacataaagcagcaggcagggctaccaaccttagcctggcaactcatgatactgtctgttcatggacttttaagttgcataagaggaagctttattcctgatagtgatagtagcttcaaatgttgtaagttcagcaaaatgagccaattatcagggcataatccactattcttcacaacaaggtgctctagtgaatttaggtcctctggagcagtatttcaatctactaataggggctctgcaagatggtggcagaggctttccaactgtactctgtgctcttgttaccagtcagcttggtacactccatacaaagtccagcaattgtttttgaattagggtgggtacactcctggcataacagaatgtccctgcaatcaaaagtcctagtccacatgattgattgaccttatactgaagagtaccctgtggaccaagtcaatctgcagatgctacattaacaataaatgttaattacttcactagggattagtctgttattttacacctttttcaaacctctggcacttgcataccattgtagctaagatatgcttctatgaaatagccaccacaggtgataagtccccctacacagcaatcttagagcaatattatccagagattgttgcagcagaaactgctgtatgctttttacctcacacactcctaatgagcttttacc

SEQ ID NO: 330 - DNA, 400 bp, Artificial Sequence
  Description of Artificial Sequence: Synthetic polynucleotide
ttctttgaatgttgttatagagccaccttgatgccttgttagtgatggttgctcctatagtagtattcctgtgatgcaaggtaaatatattgaagacctgctgtagacatgaagcagaacttgagtcctgttgagttaactgtgctactactattctgaagaaaatagtgtctacagctggaatgagttggttgctctacctaggcctaagatcatactgtgattagttacatataacccagtttaacagtattgagcttgctaaggaactttagcttcaggtatactattttcaagccatcagcttaataactataaatataccactgctgggtgatgatattagaattagggtctagtaaaggatagacagtggcattatgactatatttcaaaaata

SEQ ID NO: 331 - DNA, 200 bp, Artificial Sequence
  Description of Artificial Sequence: Synthetic polynucleotide
ctaggcctaagatcatactgtgattagttacatataacccagtttaacagtattgagcttgctaaggaactttagcttcaggtatactattttcaagccatcagcttaataactataaatataccactgctgggtgatgatattagaattagggtctagtaaaggatagacagtggcattatgactatatttcaaaaata

SEQ ID NO: 332 - DNA, 200 bp, Artificial Sequence
  Description of Artificial Sequence: Synthetic polynucleotide
ttctttgaatgttgttatagagccaccttgatgccttgttagtgatggttgctcctatagtagtattcctgtgatgcaaggtaaatatattgaagacctgctgtagacatgaagcagaacttgagtcctgttgagttaactgtgctactactattctgaagaaaatagtgtctacagctggaatgagttggttgctctac

SEQ ID NO: 333-399 - skipped (67 entries)

SEQ ID NO: 400 - DNA, 541 bp, Artificial Sequence
  Description of Artificial Sequence: Synthetic polynucleotide
gggggaggctgctggtgaatattaaccaaggtcaccccagttatcggaggagcaaacaggggctaagtccaccgggggaggctgctggtgaatattaaccaaggtcaccccagttatcggaggagcaaacaggggctaagtccaccgggggaggctgctggtgaatattaaccaaggtcaccccagttatcggaggagcaaacaggggctaagtccacggtacccactgggaggatgttgagtaagatggaaaactactgatgacccttgcagagacagagtattaggacatgtttgaacaggggccgggcgatcagcaggtagcactagaggatccccgtctgtctgcacatttcgtagagcgagtgttccgatactctaatctccctaggcaaggttcatatttgtgtaggttacttattctccttttgttgactaagtcaataatcagaatcagcaggtttggagtcagcttggcagggatcagcagcctgggttggaaggagggggtataaaagccccttcaccaggagaagccgtc

SEQ ID NO: 401 - DNA, 1125 bp, Artificial Sequence
  Description of Artificial Sequence: Synthetic polynucleotide
aggctcagaggcacacaggagtttctgggctcaccctgcccccttccaacccctcagttcccatcctccagcagctgtttgtgtgctgcctctgaagtccacactgaacaaacttcagcctactcatgtccctaaaatgggcaaacattgcaagcagcaaacagcaaacacacagccctccctgcctgctgaccttggagctggggcagaggtcagagacctctctgggcccatgccacctccaacatccacttgaccccttggaatttcagtggagaggagcagaggttgtcctggtgtggtttaggtagtgtgagagggtccaggttcaaaaccacttgctgggtggggagttgtcagtaagtggctatgccccaaccctgaagcctgtttccccatctgtacaatggaaatgataaagacccccatctgatagggtttttgtggcaaataaacatttggtttttttgttttgttttgttttgttttttgagatggaggtttgctctgtggcccaggctggagtgcagtgacacaatctcatctcaccacaaccttcccctgcctcagcctcccaagtagctgggattacaagcatgtgccaccacacctggctaattttctatttttagtagagatgggtttctccatgttggtcagcctcagcctcccaagtaactgggattacaggcctgtgccaccacacctggctaattttttctatttttgacagggatggggtttcaccatgttggtcaggctggtctagaggtactggatcttgctaccagtggaacagccactaaggattctgcagtgagagcagagggccagctaagtggtactctcccagagactgtctgactcatgccaccccctccaccttggacacaggacactgtggtttctgagccaggtacaatgactccttttggtaagtgcagtggaagctgtacactgcccaggcaaagtgtctgggcagcataggcaggtgactcagatcccagccagtggacttagcccctgtttgctcctctgataactggggtgaccttggttaatattcaccagcagcctcccctgttgcccctctggatccactgcttaaatacagacaaggacagg

SEQ ID NO: 402 - DNA, 1125 bp, Artificial Sequence
  Description of Artificial Sequence: Synthetic polynucleotide
aggctcagaggcacacaggagtttctgggctcaccctgcccccttccaacccctcagttcccatcctccagcagctgtttgtgtgctgcctctgaagtccacactgaacaaacttcagcctactcatgtccctaaaatgggcaaacattgcaagcagcaaacagcaaacacacagccctccctgcctgctgaccttggagctggggcagaggtcagagacctctctgggcccatgccacctccaacatccacttgaccccttggaatttcagtggagaggagcagaggttgtcctggtgtggtttaggtagtgtgagagggtccaggttcaaaaccacttgctgggtggggagttgtcagtaagtggctatgccccaaccctgaagcctgtttccccatctgtacaatggaaatgataaagacccccatctgatagggtttttgtggcaaataaacatttggtttttttgttttgttttgttttgttttttgagatggaggtttgctctgtggcccaggctggagtgcagtgacacaatctcatctcaccacaaccttcccctgcctcagcctcccaagtagctgggattacaagcatgtgccaccacacctggctaattttctatttttagtagagatgggtttctccatgttggtcagcctcagcctcccaagtaactgggattacaggcctgtgccaccacacctggctaattttttctatttttgacagggatggggtttcaccatgttggtcaggctggtctagaggtactggatcttgctaccagtggaacagccactaaggattctgcagtgagagcagagggccagctaagtggtactctcccagagactgtctgactcacgccaccccctccaccttggacacaggacgctgtggtttctgagccaggtacaatgactcctttcggtaagtgcagtggaagctgtacactgcccaggcaaagcgtccgggcagcgtaggcgggcgactcagatcccagccagtggacttagcccctgtttgctcctccgataactggggtgaccttggttaatattcaccagcagcctcccccgttgcccctctggatccactgcttaaatacggacgaggacagg

SEQ ID NO: 403 - DNA, 1125 bp, Artificial Sequence
  Description of Artificial Sequence: Synthetic polynucleotide
aggctcagaggcacacaggagtttctgggctcaccctgcccccttccaacccctcagttcccatcctccagcagctgtttgtgtgctgcctctgaagtccacactgaacaaacttcagcctactcatgtccctaaaatgggcaaacattgcaagcagcaaacagcaaacacacagccctccctgcctgctgaccttggagctggggcagaggtcagagacctctctgggcccatgccacctccaacatccactcgaccccttggaatttcggtggagaggagcagaggttgtcctggcgtggtttaggtagtgtgagagggtccgggttcaaaaccacttgctgggtggggagtcgtcagtaagtggctatgccccgaccccgaagcctgtttccccatctgtacaatggaaatgataaagacgcccatctgatagggtttttgtggcaaataaacatttggtttttttgttttgttttgttttgttttttgagatggaggtttgctctgtggcccaggctggagtgcagtgacacaatctcatctcaccacaaccttcccctgcctcagcctcccaagtagctgggattacaagcatgtgccaccacacctggctaattttctatttttagtagagatgggtttctccatgttggtcagcctcagcctcccaagtaactgggattacaggcctgtgccaccacacctggctaattttttctatttttgacagggatggggtttcaccatgttggtcaggctggtctagaggtactggatcttgctaccagtggaacagccactaaggattctgcagtgagagcagagggccagctaagtggtactctcccagagactgtctgactcacgccaccccctccaccttggacacaggacgctgtggtttctgagccaggtacaatgactcctttcggtaagtgcagtggaagctgtacactgcccaggcaaagcgtccgggcagcgtaggcgggcgactcagatcccagccagtggacttagcccctgtttgctcctccgataactggggtgaccttggttaatattcaccagcagcctcccccgttgcccctctggatccactgcttaaatacggacgaggacagg

SEQ ID NO: 404 - DNA, 1125 bp, Artificial Sequence
  Description of Artificial Sequence: Synthetic polynucleotide
aggctcagaggcacacaggagtttctgggctcaccctgcccccttccaacccctcagttcccatcctccagcagctgtttgtgtgctgcctctgaagtccacactgaacaaacttcagcctactcatgtccctaaaatgggcaaacattgcaagcagcaaacagcaaacacacagccctccctgcctgctgaccttggagctggggcagaggtcagagacctctctgggcccatgccacctccaacatccactcgaccccttggaatttcagtggagaggagcagaggttgtcctggtgtggtttaggtagtgtgagagggtccaggttcaaaaccacttgctgggtggggagttgtcagtaagtggctatgccccgaccccgaagcctgtttccccatctgtacaatggaaatgataaagacgcccatctgatagggtttttgtggcaaataaacatttggtttttttgttttgttttgttttgttttttgagatggaggtttgctctgtcgcccaggctggagtgcagtgacacaatctcatctcaccacaaccttcccctgcctcagcctcccaagtagctgggattacaagcatgtgccaccacacctggctaattttctatttttagtagagacgggtttctccatgttggtcagcctcagcctcccaagtaactgggattacaggcctgtgccaccacacccggctaattttttctatttttgacagggacggggtttcaccatgttggtcaggctggtctagaggtactggatcttgctaccagtggaacagccactaaggattctgcagtgagagcagagggccagctaagtggtactctcccagagactgtctgactcacgccaccccctccaccttggacacaggacgctgtggtttctgagccaggtacaatgactcctttcggtaagtgcagtggaagctgtacactgcccaggcaaagcgtccgggcagcgtaggcgggcgactcagatcccagccagtggacttagcccctgtttgctcctccgataactggggtgaccttggttaatattcaccagcagcctcccccgttgcccctctggatccactgcttaaatacggacgaggacagg

SEQ ID NO: 405 - DNA, 1125 bp, Artificial Sequence
  Description of Artificial Sequence: Synthetic polynucleotide
aggctcagaggcacacaggagtttctgggctcaccctgcccccttccaacccctcagttcccatcctccagcagctgtttgtgtgctgcctctgaagtccacactgaacaaacttcagcctactcatgtccctaaaatgggcaaacattgcaagcagcaaacagcaaacacacagccctccctgcctgctgaccttggagctggggcagaggtcagagacctctctgggcccatgccacctccaacatccacttgaccccttggaatttcggtggagaggagcagaggttgtcctggcgtggtttaggtagtgtgagagggtccgggttcaaaaccacttgctgggtggggagtcgtcagtaagtggctatgccccaaccctgaagcctgtttccccatctgtacaatggaaatgataaagacccccatctgatagggtttttgtggcaaataaacatttggtttttttgttttgttttgttttgttttttgagatggaggtttgctctgtcgcccaggctggagtgcagtgacacaatctcatctcaccacaaccttcccctgcctcagcctcccaagtagctgggattacaagcatgtgccaccacacctggctaattttctatttttagtagagacgggtttctccatgttggtcagcctcagcctcccaagtaactgggattacaggcctgtgccaccacacccggctaattttttctatttttgacagggacggggtttcaccatgttggtcaggctggtctagaggtactggatcttgctaccagtggaacagccactaaggattctgcagtgagagcagagggccagctaagtggtactctcccagagactgtctgactcacgccaccccctccaccttggacacaggacgctgtggtttctgagccaggtacaatgactcctttcggtaagtgcagtggaagctgtacactgcccaggcaaagcgtccgggcagcgtaggcgggcgactcagatcccagccagtggacttagcccctgtttgctcctccgataactggggtgaccttggttaatattcaccagcagcctcccccgttgcccctctggatccactgcttaaatacggacgaggacagg

SEQ ID NO: 406 - DNA, 1125 bp, Artificial Sequence
  Description of Artificial Sequence: Synthetic polynucleotide
aggctcagaggcacacaggagtttctgggctcaccctgcccccttccaacccctcagttcccatcctccagcagctgtttgtgtgctgcctctgaagtccacactgaacaaacttcagcctactcatgtccctaaaatgggcaaacattgcaagcagcaaacagcaaacacacagccctccctgcctgctgaccttggagctggggcagaggtcagagacctctctgggcccatgccacctccaacatccactcgaccccttggaatttcggtggagaggagcagaggttgtcctggcgtggtttaggtagtgtgagagggtccgggttcaaaaccacttgctgggtggggagtcgtcagtaagtggctatgccccgaccccgaagcctgtttccccatctgtacaatggaaatgataaagacgcccatctgatagggtttttgtggcaaataaacatttggtttttttgttttgttttgttttgttttttgagatggaggtttgctctgtcgcccaggctggagtgcagtgacacaatctcatctcaccacaaccttcccctgcctcagcctcccaagtagctgggattacaagcatgtgccaccacacctggctaattttctatttttagtagagacgggtttctccatgttggtcagcctcagcctcccaagtaactgggattacaggcctgtgccaccacacccggctaattttttctatttttgacagggacggggtttcaccatgttggtcaggctggtctagaggtactggatcttgctaccagtggaacagccactaaggattctgcagtgagagcagagggccagctaagtggtactctcccagagactgtctgactcatgccaccccctccaccttggacacaggacactgtggtttctgagccaggtacaatgactccttttggtaagtgcagtggaagctgtacactgcccaggcaaagtgtctgggcagcataggcaggtgactcagatcccagccagtggacttagcccctgtttgctcctctgataactggggtgaccttggttaatattcaccagcagcctcccctgttgcccctctggatccactgcttaaatacagacaaggacagg

SEQ ID NO: 407 - DNA, 1125 bp, Artificial Sequence
  Description of Artificial Sequence: Synthetic polynucleotide
aggctcagaggcacacaggagtttctgggctcaccctgcccccttccaacccctcagttcccatcctccagcagctgtttgtgtgctgcctctgaagtccacactgaacaaacttcagcctactcatgtccctaaaatgggcaaacattgcaagcagcaaacagcaaacacacagccctccctgcctgctgaccttggagctggggcagaggtcagagacctctctgggcccatgccacctccaacatccactcgaccccttggaatttcggtggagaggagcagaggttgtcctggcgtggtttaggtagtgtgagagggtccgggttcaaaaccacttgctgggtggggagtcgtcagtaagtggctatgccccgaccccgaagcctgtttccccatctgtacaatggaaatgataaagacgcccatctgatagggtttttgtggcaaataaacatttggtttttttgttttgttttgttttgttttttgagatggaggtttgctctgtcgcccaggctggagtgcagtgacacaatctcatctcaccacaaccttcccctgcctcagcctcccaagtagctgggattacaagcatgtgccaccacacctggctaattttctatttttagtagagacgggtttctccatgttggtcagcctcagcctcccaagtaactgggattacaggcctgtgccaccacacccggctaattttttctatttttgacagggacggggtttcaccatgttggtcaggctggtctagaggtactggatcttgctaccagtggaacagccactaaggattctgcagtgagagcagagggccagctaagtggtactctcccagagactgtctgactcatgccaccccctccaccttggacacaggacactgtggtttctgagccaggtacaatgactccttttggtaagtgcagtggaagctgtacactgcccaggcaaagtgtccgggcagcgtaggcgggcgactcagatcccagccagtggacttagcccctgtttgctcctccgataactggggtgaccttggttaatattcaccagcagcctcccccgttgcccctctggatccactgcttaaatacggacgaggacagg

SEQ ID NO: 408 - DNA, 1125 bp, Artificial Sequence
  Description of Artificial Sequence: Synthetic polynucleotide
aggctcagaggcacacaggagtttctgggctcaccctgcccccttccaacccctcagttcccatcctccagcagctgtttgtgtgctgcctctgaagtccacactgaacaaacttcagcctactcatgtccctaaaatgggcaaacattgcaagcagcaaacagcaaacacacagccctccctgcctgctgaccttggagctggggcagaggtcagagacctctctgggcccatgccacctccaacatccactcgaccccttggaatttcggtggagaggagcagaggttgtcctggcgtggtttaggtagtgtgagagggtccgggttcaaaaccacttgctgggtggggagtcgtcagtaagtggctatgccccgaccccgaagcctgtttccccatctgtacaatggaaatgataaagacgcccatctgatagggtttttgtggcaaataaacatttggtttttttgttttgttttgttttgttttttgagatggaggtttgctctgtcgcccaggctggagtgcagtgacacaatctcatctcaccacaaccttcccctgcctcagcctcccaagtagctgggattacaagcatgtgccaccacacctggctaattttctatttttagtagagacgggtttctccatgttggtcagcctcagcctcccaagtaactgggattacaggcctgtgccaccacacccggctaattttttctatttttgacagggacggggtttcaccatgttggtcaggctggtctagaggtactggatcttgctaccagtggaacagccactaaggattctgcagtgagagcagagggccagctaagtggtactctcccagagactgtctgactcacgccaccccctccaccttggacacaggacgctgtggtttctgagccaggtacaatgactcctttcggtaagtgcagtggaagctgtacactgcccaggcaaagcgtccgggcagcgtaggcgggcgactcagatcccagccagtggacttagcccctgtttgctcctctgataactggggtgaccttggttaatattcaccagcagcctcccctgttgcccctctggatccactgcttaaatacggacaaggacagg

SEQ ID NO: 409 - DNA, 1125 bp, Artificial Sequence
  Description of Artificial Sequence: Synthetic polynucleotide
aggctcagaggcacacaggagtttctgggctcaccctgcccccttccaacccctcagttcccatcctccagcagctgtttgtgtgctgcctctgaagtccacactgaacaaacttcagcctactcatgtccctaaaatgggcaaacattgcaagcagcaaacagcaaacacacagccctccctgcctgctgaccttggagctggggcagaggtcagagacctctctgggcccatgccacctccaacatccactcgaccccttggaatttcggtggagaggagcagaggttgtcctggcgtggtttaggtagtgtgagagggtccgggttcaaaaccacttgctgggtggggagtcgtcagtaagtggctatgccccgaccccgaagcctgtttccccatctgtacaatggaaatgataaagacgcccatctgatagggtttttgtggcaaataaacatttggtttttttgttttgttttgttttgttttttgagatggaggtttgctctgtcgcccaggctggagtgcagtgacacaatctcatctcaccacaaccttcccctgcctcagcctcccaagtagctgggattacaagcatgtgccaccacacctggctaattttctatttttagtagagacgggtttctccatgttggtcagcctcagcctcccaagtaactgggattacaggcctgtgccaccacacccggctaattttttctatttttgacagggacggggtttcaccatgttggtcaggctggtctagaggtactggatcttgctaccagtggaacagccactaaggattctgcagtgagagcagagggccagctaagtggtactctcccagagactgtctgactcacgccaccccctccaccttggacacaggacgctgtggtttctgagccaggtacaatgactcctttcggtaagtgcagtggaagctgtacactgcccaggcaaagcgtctgggcagcataggcaggcgactcagatcccagccagtggacttagcccctgtttgctcctccgataactggggtgaccttggttaatattcaccagcagcctcccccgttgcccctctggatccactgcttaaatacggacgaggacagg

SEQ ID NO: 410 - DNA, 1125 bp, Artificial Sequence
  Description of Artificial Sequence: Synthetic polynucleotide
aggctcagaggcacacaggagtttctgggctcaccctgcccccttccaacccctcagttcccatcctccagcagctgtttgtgtgctgcctctgaagtccacactgaacaaacttcagcctactcatgtccctaaaatgggcaaacattgcaagcagcaaacagcaaacacacagccctccctgcctgctgaccttggagctggggcagaggtcagagacctctctgggcccatgccacctccaacatccactcgaccccttggaatttcggtggagaggagcagaggttgtcctggcgtggtttaggtagtgtgagagggtccgggttcaaaaccacttgctgggtggggagtcgtcagtaagtggctatgccccgaccccgaagcctgtttccccatctgtacaatggaaatgataaagacgcccatctgatagggtttttgtggcaaataaacatttggtttttttgttttgttttgttttgttttttgagatggaggtttgctctgtggcccaggctggagtgcagtgacacaatctcatctcaccacaaccttcccctgcctcagcctcccaagtagctgggattacaagcatgtgccaccacacctggctaattttctatttttagtagagatgggtttctccatgttggtcagcctcagcctcccaagtaactgggattacaggcctgtgccaccacacctggctaattttttctatttttgacagggatggggtttcaccatgttggtcaggctggtctagaggtactggatcttgctaccagtggaacagccactaaggattctgcagtgagagcagagggccagctaagtggtactctcccagagactgtctgactcacgccaccccctccaccttggacacaggacgctgtggtttctgagccaggtacaatgactcctttcggtaagtgcagtggaagctgtacactgcccaggcaaagcgtccgggcagcgtaggcgggcgactcagatcccagccagtggacttagcccctgtttgctcctctgataactggggtgaccttggttaatattcaccagcagcctcccccgttgcccctctggatccactgcttaaatacagacgaggacagg

SEQ ID NO: 411 - DNA, 129 bp, Artificial Sequence
  Description of Artificial Sequence: Synthetic polynucleotide
acacagatccacaagctcctgaagaggtaagggtttaagggatggttggttggtggggtattaatgtttaattacctggagcacctgcctgaaatcactttttttcaggttggtttaaacgccgccacc

SEQ ID NO: 412 - DNA, 130 bp, Artificial Sequence
  Description of Artificial Sequence: Synthetic polynucleotide
acacagatccacaagctcctgaagaggtaagggtttaagggatggttggttggtggggtattaatgtttaattacctggagcacctgcctgaaatcactttttttcaggttgggtttaaacgccgccacc

SEQ ID NO: 413 - DNA, 129 bp, Artificial Sequence
  Description of Artificial Sequence: Synthetic polynucleotide
acacagatccacaagctcctgaagaggtaagggtttaagggatggttggttggtggggtattaatgtttaattacctggagcacctgcctgaaatcactttttttcaggttgggttaaacgccgccacc

SEQ ID NO: 414 - DNA, 49 bp, Artificial Sequence
  Description of Artificial Sequence: Synthetic oligonucleotide
gccctgtctcctcagcttcaggcaccaccactgacctgggacagtgaat

SEQ ID NO: 415 - DNA, 47 bp, Artificial Sequence
  Description of Artificial Sequence: Synthetic oligonucleotide
acacagatccacaagctcctgaagaggttggtttaaacgccgccacc

SEQ ID NO: 416 - DNA, 50 bp, Artificial Sequence
  Description of Artificial Sequence: Synthetic oligonucleotide
catttcgtgggctaagtttaagctactctcgctccgggataagagtttca

SEQ ID NO: 417 - DNA, 25 bp, Artificial Sequence
  Description of Artificial Sequence: Synthetic oligonucleotide
gggacatcgtagagagtcgtactta

SEQ ID NO: 418 - DNA, 162 bp, Artificial Sequence
  Description of Artificial Sequence: Synthetic polynucleotide
gccctgtctcctcagcttcaggcaccaccactgacctgggacagtgaataattactctaaggtaaatataaaatttttaagtgtataatgtgttaaactactgattctaattgtttctctcttttagattccaacctttggaactgagtttaaacagccacc

SEQ ID NO: 419 - DNA, 165 bp, Artificial Sequence
  Description of Artificial Sequence: Synthetic polynucleotide
gccctgtctcctcagcttcaggcaccaccactgacctgggacagtgaataattactctaaggtaaatataaaatttttaagtgtataatgtgttaaactactgattctaattgtttctctcttttagattccaacctttggaactgagtttaaaccgcagccacc

SEQ ID NO: 420 - DNA, 164 bp, Artificial Sequence
  Description of Artificial Sequence: Synthetic polynucleotide
gccctgtctcctcagcttcaggcaccaccactgacctgggacagtgaataattactctaaggtaaatataaaatttttaagtgtataatgtgttaaactactgattctaattgtttctctcttttagattccaacctttggaactgagtttaaacgccgccacc

SEQ ID NO: 421 - DNA, 230 bp, Artificial Sequence
  Description of Artificial Sequence: Synthetic polynucleotide
gccctgtctcctcagcttcaggcaccaccactgacctgggacagtgaataattactctaaggtaaatataaaatttttaagtgtataatgtgttaaactactgattctaattgtttctctcttttagattccaacctttggaactgagtttaaacgggacatcgtagagagtcgtacttacatttcgtgggctaagtttaagctactctcgctccgggataagagtttca

SEQ ID NO: 422 - DNA, 150 bp, Artificial Sequence
  Description of Artificial Sequence: Synthetic polynucleotide
gccctgtctcctcagcttcaggcaccaccactgacctgggacagtgaataattactctaaggtaaatataaaatttttaagtgtataatgtgttaaactactgattctaattgtttctctcttttagattccaacctttggaactgaacc

SEQ ID NO: 423 - DNA, 135 bp, Artificial Sequence
  Description of Artificial Sequence: Synthetic polynucleotide
acacagatccacaagctcctgtctagaaagaggtaagggtttaagggatggttggttggtggggtattaatgtttaattacctggagcacctgcctgaaatcactttttttcaggttggtttaaacgccgccacc

SEQ ID NO: 424 - DNA, 136 bp, Artificial Sequence
  Description of Artificial Sequence: Synthetic polynucleotide
acacagatccacaagctcctgtctagaaagaggtaagggtttaagggatggttggttggtggggtattaatgtttaattacctggagcacctgcctgaaatcactttttttcaggttgggtttaaacgccgccacc

SEQ ID NO: 425 - DNA, 135 bp, Artificial Sequence
  Description of Artificial Sequence: Synthetic polynucleotide
acacagatccacaagctcctgtctagaaagaggtaagggtttaagggatggttggttggtggggtattaatgtttaattacctggagcacctgcctgaaatcactttttttcaggttgggttaaacgccgccacc

SEQ ID NO: 426 - DNA, 21 bp, Artificial Sequence
  Description of Artificial Sequence: Synthetic oligonucleotide
acacagatccacaagctcctg

SEQ ID NO: 427 - DNA, 67 bp, Artificial Sequence
  Description of Artificial Sequence: Synthetic oligonucleotide
gccctgtctcctcagcttcaggcaccaccactgacctgggacagtgaatgtttaaaccgcagccacc

SEQ ID NO: 428 - DNA, 131 bp, Artificial Sequence
  Description of Artificial Sequence: Synthetic polynucleotide
acacagatccacaagctcctgaagaggtaagggtttaagggatggttggttggtggggtattaatgtttaattacctggagcacctgcctgaaatcactttttttcaggttgggtttaaaccgcagccacc

SEQ ID NO: 429 - DNA, 195 bp, Artificial Sequence
  Description of Artificial Sequence: Synthetic polynucleotide
acacagatccacaagctcctgaagaggtaagggtttaagggatggttggttggtggggtattaatgtttaattacctggagcacctgcctgaaatcactttttttcaggttggtttaaacgggacatcgtagagagtcgtacttacatttcgtgggctaagtttaagctactctcgctccgggataagagtttca

SEQ ID NO: 430 - DNA, 130 bp, Artificial Sequence
  Description of Artificial Sequence: Synthetic polynucleotide
acacagatccacaagctcctgaagaggtaagggtttaagggatggttggttggtggggtattaatgtttaattacctggagcacctgcctgaaatcactttttttcaggttgggttaaaccgcagccacc

SEQ ID NO: 431 - DNA, 130 bp, Artificial Sequence
  Description of Artificial Sequence: Synthetic polynucleotide
acacagatccacaagctcctgaagaggtaagggtttaagggatggttggttggtggggtattaatgtttaattacctggagcacctgcctgaaatcactttttttcaggttggtttaaaccgcagccacc

SEQ ID NO: 432 - DNA, 48 bp, Artificial Sequence
  Description of Artificial Sequence: Synthetic oligonucleotide
acacagatccacaagctcctgaagaggttggtttaaaccgcagccacc

SEQ ID NO: 433 - DNA, 137 bp, Artificial Sequence
  Description of Artificial Sequence: Synthetic polynucleotide
acacagatccacaagctcctgtctagaaagaggtaagggtttaagggatggttggttggtggggtattaatgtttaattacctggagcacctgcctgaaatcactttttttcaggttgggtttaaaccgcagccacc

SEQ ID NO: 434 - DNA, 136 bp, Artificial Sequence
  Description of Artificial Sequence: Synthetic polynucleotide
acacagatccacaagctcctgtctagaaagaggtaagggtttaagggatggttggttggtggggtattaatgtttaattacctggagcacctgcctgaaatcactttttttcaggttgggttaaaccgcagccacc

SEQ ID NO: 435 - DNA, 136 bp, Artificial Sequence
  Description of Artificial Sequence: Synthetic polynucleotide
acacagatccacaagctcctgtctagaaagaggtaagggtttaagggatggttggttggtggggtattaatgtttaattacctggagcacctgcctgaaatcactttttttcaggttggtttaaaccgcagccacc

SEQ ID NO: 436 - DNA, 66 bp, Artificial Sequence
  Description of Artificial Sequence: Synthetic oligonucleotide
gccctgtctcctcagcttcaggcaccaccactgacctgggacagtgaatgtttaaacgccgccacc

SEQ ID NO: 437 - DNA, 16 bp, Adeno-associated virus 2
gcgcgctcgctcgctc

SEQ ID NO: 438 - DNA, 4 bp, Unknown
  Description of Unknown: TRS sequence
agtt

SEQ ID NO: 439 - DNA, 8 bp, Artificial Sequence
  Description of Artificial Sequence: Synthetic oligonucleotide
actgaggc

SEQ ID NO: 440 - DNA, 8 bp, Artificial Sequence
  Description of Artificial Sequence: Synthetic oligonucleotide
gcctcagt

SEQ ID NO: 441 - DNA, 16 bp, Adeno-associated virus 2
gagcgagcgagcgcgc

SEQ ID NO: 442 - DNA, 6167 bp, Artificial Sequence
  Description of Artificial Sequence: Synthetic polynucleotide
cctgcaggcagctgcgcgctcgctcgctcactgaggccgcccgggcaaagcccgggcgtcgggcgacctttggtcgcccggcctcagtgagcgagcgagcgcgcagagagggagtggccaactccatcactaggggttccttgtagttaatgattaacccgccatgctacttatcgcggccgccggtacgcgggggaggctgctggtgaatattaaccaaggtcaccccagttatcggaggagcaaacaggggctaagtccaccgggggaggctgctggtgaatattaaccaaggtcaccccagttatcggaggagcaaacaggggctaagtccaccgggggaggctgctggtgaatattaaccaaggtcaccccagttatcggaggagcaaacaggggctaagtccactgtacaacgcgtgaattcgctagcgtctgtctgcacatttcgtagagcgagtgttccgatactctaatctccctaggcaaggttcatatttgtgtaggttacttattctccttttgttgactaagtcaataatcagaatcagcaggtttggagtcagcttggcagggatcagcagcctgggttggaaggagggggtataaaagccccttcaccaggagaagccgtcacacagatccacaagctcctgtctagaaagaggtaagggtttaagggatggttggttggtggggtattaatgtttaattacctggagcacctgcctgaaatcactttttttcaggttggtttaaacgccgccaccatgcagattgagctgagcacctgcttcttcctgtgcctgctgaggttctgcttctctgccaccaggagatactacctgggggctgtggagctgagctgggactacatgcagtctgacctgggggagctgcctgtggatgccaggttcccccccagagtgcccaagagcttccccttcaacacctctgtggtgtacaagaagaccctgtttgtggagttcactgaccacctgttcaacattgccaagcccaggcccccctggatgggcctgctgggccccaccatccaggctgaggtgtatgacactgtggtgatcaccctgaagaacatggccagccaccctgtgagcctgcatgctgtgggggtgagctactggaaggcctctgagggggctgagtatgatgaccagaccagccagagggagaaggaggatgacaaggtgttccctgggggcagccacacctatgtgtggcaggtgctgaaggagaatggccccatggcctctgaccccctgtgcctgacctacagctacctgagccatgtggacctggtgaaggacctgaactctggcctgattggggccctgctggtgtgcagggagggcagcctggccaaggagaagacccagaccctgcacaagttcatcctgctgtttgctgtgtttgatgagggcaagagctggcactctgaaaccaagaacagcctgatgcaggacagggatgctgcctctgccagggcctggcccaagatgcacactgtgaatggctatgtgaacaggagcctgcctggcctgattggctgccacaggaagtctgtgtactggcatgtgattggcatgggcaccacccctgaggtgcacagcatcttcctggagggccacaccttcctggtcaggaaccacaggcaggccagcctggagatcagccccatcaccttcctgactgcccagaccctgctgatggacctgggccagttcctgctgttctgccacatcagcagccaccagcatgatggcatggaggcctatgtgaaggtggacagctgccctgaggagccccagctgaggatgaagaacaatgaggaggctgaggactatgatgatgacctgactgactctgagatggatgtggtgaggtttgatgatgacaacagccccagcttcatccagatcaggtctgtggccaagaagcaccccaagacctgggtgcactacattgctgctgaggaggaggactgggactatgcccccctggtgctggcccctgatgacaggagctacaagagccagtacctgaacaatggcccccagaggattggcaggaagtacaagaaggtcaggttcatggcctacactgatgaaaccttcaagaccagggaggccatccagcatgagtctggcatcctgggccccctgctgtatggggaggtgggggacaccctgctgatcatcttcaagaaccaggccagcaggccctacaacatctacccccatggcatcactgatgtgaggcccctgtacagcaggaggctgcccaagggggtgaagcacctgaaggacttccccatcctgcctggggagatcttcaagtacaagtggactgtgactgtggaggatggccccaccaagtctgaccccaggtgcctgaccagatactacagcagctttgtgaacatggagagggacctggcctctggcctgattggccccctgctgatctgctacaaggagtctgtggaccagaggggcaaccagatcatgtctgacaagaggaatgtgatcctgttctctgtgtttgatgagaacaggagctggtacctgactgagaacatccagaggttcctgcccaaccctgctggggtgcagctggaggaccctgagttccaggccagcaacatcatgcacagcatcaatggctatgtgtttgacagcctgcagctgtctgtgtgcctgcatgaggtggcctactggtacatcctgagcattggggcccagactgacttcctgtctgtgttcttctctggctacaccttcaagcacaagatggtgtatgaggacaccctgaccctgttccccttctctggggagactgtgttcatgagcatggagaaccctggcctgtggattctgggctgccacaactctgacttcaggaacaggggcatgactgccctgctgaaagtctccagctgtgacaagaacactggggactactatgaggacagctatgaggacatctctgcctacctgctgagcaagaacaatgccattgagcccaggagcttcagccagaatagcaggcaccccagcaccaggcagaagcagttcaatgccaccaccatcccagagaataccaccctgcagtctgaccaggaggagattgactatgatgacaccatctctgtggagatgaagaaggaggactttgacatctacgacgaggacgagaaccagagccccaggagcttccagaagaagaccaggcactacttcattgctgctgtggagaggctgtgggactatggcatgagcagcagcccccatgtgctgaggaacagggcccagtctggctctgtgccccagttcaagaaggtggtgttccaggagttcactgatggcagcttcacccagcccctgtacagaggggagctgaatgagcacctgggcctgctgggcccctacatcagggctgaggtggaggacaacatcatggtgaccttcaggaaccaggccagcaggccctacagcttctacagcagcctgatcagctatgaggaggaccagaggcagggggctgagcccaggaagaactttgtgaagcccaatgaaaccaagacctacttctggaaggtgcagcaccacatggcccccaccaaggatgagtttgactgcaaggcctgggcctacttctctgatgtggacctggagaaggatgtgcactctggcctgattggccccctgctggtgtgccacaccaacaccctgaaccctgcccatggcaggcaggtgactgtgcaggagtttgccctgttcttcaccatctttgatgaaaccaagagctggtacttcactgagaacatggagaggaactgcagggccccctgcaacatccagatggaggaccccaccttcaaggagaactacaggttccatgccatcaatggctacatcatggacaccctgcctggcctggtgatggcccaggaccagaggatcaggtggtacctgctgagcatgggcagcaatgagaacatccacagcatccacttctctggccatgtgttcactgtgaggaagaaggaggagtacaagatggccctgtacaacctgtaccctggggtgtttgagactgtggagatgctgcccagcaaggctggcatctggagggtggagtgcctgattggggagcacctgcatgctggcatgagcaccctgttcctggtgtacagcaacaagtgccagacccccctgggcatggcctctggccacatcagggacttccagatcactgcctctggccagtatggccagtgggcccccaagctggccaggctgcactactctggcagcatcaatgcctggagcaccaaggagcccttcagctggatcaaggtggacctgctggcccccatgatcatccatggcatcaagacccagggggccaggcagaagttcagcagcctgtacatcagccagttcatcatcatgtacagcctggatggcaagaagtggcagacctacaggggcaacagcactggcaccctgatggtgttctttggcaatgtggacagctctggcatcaagcacaacatcttcaacccccccatcattgccagatacatcaggctgcaccccacccactacagcatcaggagcaccctgaggatggagctgatgggctgtgacctgaacagctgcagcatgcccctgggcatggagagcaaggccatctctgatgcccagatcactgccagcagctacttcaccaacatgtttgccacctggagccccagcaaggccaggctgcacctgcagggcaggagcaatgcctggaggccccaggtcaacaaccccaaggagtggctgcaggtggacttccagaagaccatgaaggtgactggggtgaccacccagggggtgaagagcctgctgaccagcatgtatgtgaaggagttcctgatcagcagcagccaggatggccaccagtggaccctgttcttccagaatggcaaggtgaaggtgttccagggcaaccaggacagcttcacccctgtggtgaacagcctggacccccccctgctgaccagatacctgaggattcacccccagagctgggtgcaccagattgccctgaggatggaggtgctgggctgtgaggcccaggacctgtactgattaattaagagcatcttaccgccatttattcccatatttgttctgtttttcttgatttgggtatacatttaaatgttaataaaacaaaatggtggggcaatcatttacatttttagggatatgtaattactagttcaggtgtattgccacaagacaaacatgttaagaaactttcccgttatttacgctctgttcctgttaatcaacctctggattacaaaatttgtgaaagattgactgatattcttaactatgttgctccttttacgctgtgtggatatgctgctttatagcctctgtatctagctattgcttcccgtacggctttcgttttctcctccttgtataaatcctggttgctgtctcttttagaggagttgtggcccgttgtccgtcaacgtggcgtggtgtgctctgtgtttgctgacgcaacccccactggctggggcattgccaccacctgtcaactcctttctgggactttcgctttccccctcccgatcgccacggcagaactcatcgccgcctgccttgcccgctgctggacaggggctaggttgctgggcactgataattccgtggtgttgtctgtgccttctagttgccagccatctgttgtttgcccctcccccgtgccttccttgaccctggaaggtgccactcccactgtcctttcctaataaaatgaggaaattgcatcgcattgtctgagtaggtgtcattctattctggggggtggggtggggcaggacagcaagggggaggattgggaagacaatagcaggcatgctggggatgcggtgggctctatggctctagagcatggctacgtagataagtagcatggcgggttaatcattaactacacctgcaggaggaacccctagtgatggagttggccactccctctctgcgcgctcgctcgctcactgaggccgggcgaccaaaggtcgcccgacgcccgggcggcctcagtgagcgagcgagcgcgcagctgcctgcagg

SEQ ID NO: 443 - DNA, 6250 bp, Artificial Sequence
  Description of Artificial Sequence: Synthetic polynucleotide
cctgcaggcagctgcgcgctcgctcgctcactgaggccgcccgggcaaagcccgggcgtcgggcgacctttggtcgcccggcctcagtgagcgagcgagcgcgcagagagggagtggccaactccatcactaggggttccttgtagttaatgattaacccgccatgctacttatcgcggccgcgggggaggctgctggtgaatattaaccaaggtcaccccagttatcggaggagcaaacaggggctaagtccaccgggggaggctgctggtgaatattaaccaaggtcaccccagttatcggaggagcaaacaggggctaagtccaccgggggaggctgctggtgaatattaaccaaggtcaccccagttatcggaggagcaaacaggggctaagtccacggtacccactgggaggatgttgagtaagatggaaaactactgatgacccttgcagagacagagtattaggacatgtttgaacaggggccgggcgatcagcaggtagcactagaggatccccgtctgtctgcacatttcgtagagcgagtgttccgatactctaatctccctaggcaaggttcatatttgtgtaggttacttattctccttttgttgactaagtcaataatcagaatcagcaggtttggagtcagcttggcagggatcagcagcctgggttggaaggagggggtataaaagccccttcaccaggagaagccgtcacacagatccacaagctcctgaagaggtaagggtttaagggatggttggttggtggggtattaatgtttaattacctggagcacctgcctgaaatcactttttttcaggttggtttaaacgccgccaccatgcaaattgagttatccacctgtttcttcctctgtctcctgaggttctgcttctctgccaccaggagatactacctgggggctgtggagctgtcctgggactacatgcagtcagacctgggggagctgccagttgatgccaggttcccccccagagtccccaagtccttccccttcaacacctcagtggtgtacaaaaagaccctgtttgtggagttcacagaccacctgttcaacatagccaagcccaggcccccctggatgggcctgctgggccccaccatccaggcagaggtttatgacacagtggtcatcaccctgaagaacatggcctcccaccctgtgtccctccatgctgtgggggtgagctactggaaggccagtgagggggcagaatatgatgaccagaccagccagagggagaaggaggatgacaaggtgttcccagggggcagccacacctatgtgtggcaggtcctgaaggagaatggccccatggcctctgaccccctctgcctcacctactcctacctgtcccatgtggacctggtgaaggacctcaactctggcctgattggagccctcctggtgtgcagggaggggagcctggccaaggaaaagacccagaccctgcacaagtttatcctgctctttgcagtctttgatgaggggaagtcctggcacagtgagaccaagaactccctgatgcaggacagagatgctgcctcagccagggcctggcccaagatgcacacagtgaatgggtatgtcaacaggagcctgccaggcctgattgggtgccacagaaagtcagtgtactggcatgtcattggcatgggcaccaccccagaggtgcactccatcttcctggagggccacaccttcctggtgaggaaccacagacaggccagcctggagatcagcccaatcaccttcctcacagcccagaccctcctcatggacctgggccagtttctcctgttctgccacatctcctcccaccagcatgatggcatggaggcctatgtgaaggtggacagctgccctgaggagccccagctcaggatgaagaacaatgaggaggcagaggactatgatgatgatctgacagactctgagatggatgtggtgagatttgatgatgacaacagcccctccttcatccagatcaggtctgtggccaagaagcaccctaagacctgggtgcactacattgcagctgaggaggaggactgggactatgcccccctggtcctggcccctgatgataggtcctacaagtcccagtacctgaacaatggcccccagaggatagggagaaagtacaagaaggtgaggttcatggcctacactgatgagaccttcaagactagggaagccatccagcatgagtctgggatcctgggccccctcctctatggggaggtgggggacaccctgctgatcatcttcaagaaccaggccagcaggccctacaacatttacccccatgggatcacagatgtgagacccctgtacagcaggagactgccaaagggggtgaagcacctgaaggacttccccatcctgccaggggagatcttcaagtacaagtggactgtgacagtggaggatgggcccaccaaatctgaccctagatgcctgaccagatactacagcagctttgtgaacatggagagggacctggcctctggactgattggccctctgctgatctgctacaaggagagtgtggaccagaggggaaaccagatcatgtctgacaagaggaatgtgatcctgttctcagtgtttgatgagaacagatcctggtacctcactgagaacatccagaggttcctgcccaacccagcaggggtgcagctggaggacccagagttccaggcctccaacatcatgcactccatcaatggctatgtctttgactccctgcagctgtcagtgtgcctgcatgaggtggcctactggtacatcctctccattggagcccagactgacttcctgtcagtcttcttcagtggctacaccttcaagcacaagatggtctatgaggacactctgaccctgttccccttctctggggagactgtgttcatgtccatggagaaccctggactgtggatcctgggctgccacaacagtgacttcaggaacaggggcatgactgccctgctgaaggtctccagctgtgacaagaacactggggactactatgaggactcctatgaggacatctctgcctacctgctgtccaagaacaatgccattgagcccaggtccttctcccagaacagcagacacccctccaccaggcagaagcagttcaatgcaaccaccatccctgaaaataccaccctgcagagtgaccaggaggagattgactatgatgacaccatctctgtggagatgaagaaggaggactttgacatctatgatgaggatgagaaccagagccctagaagcttccagaagaagaccagacactacttcattgctgcagtggaaagactgtgggactatgggatgagctcctccccccatgtgctgaggaacagggcccagtctggctctgtgccccagttcaagaaggtggtgttccaggagttcactgatggctccttcacccagcccctgtacaggggagagctgaatgagcacctgggcctgctgggcccctacatcagggctgaggtggaggacaatatcatggtgaccttcagaaaccaggcctccagaccttactccttctacagcagcctgatctcctatgaggaggaccagagacagggggctgagcccaggaagaactttgtgaagcccaatgagaccaagacctacttctggaaggtgcagcaccacatggcccccaccaaggatgagtttgactgcaaggcctgggcctacttctctgatgtggacctggagaaggatgtgcactctggcctgattggccccctgctggtgtgccacaccaacaccctgaaccctgcccatggcaggcaggtgactgtgcaggagtttgccctgttcttcaccatctttgatgagaccaagagctggtacttcactgagaacatggagaggaactgcagggccccctgcaacatccagatggaggaccccaccttcaaggagaactacaggttccatgccatcaatggctacatcatggacaccctgcctggcctggtgatggcccaggaccagaggatcaggtggtacctgctgagcatggggagcaatgagaacatccacagcatccacttctctggccatgtgttcacagtgaggaagaaggaggagtacaagatggccctgtacaacctgtaccctggggtgtttgagacagtggagatgctgccctccaaggctggaatctggagggtggagtgcctgattggggagcacctgcatgctggcatgagcaccctgttcctggtgtacagcaacaagtgccagacccccctgggcatggcctctggccacatcagagacttccagatcacagcctcaggccagtatggccagtgggcccccaagctggccaggctgcactactctggcagcatcaatgcctggtccaccaaggagcccttcagctggatcaaggtggacctcctggcccccatgatcatccatggcatcaagacccagggggccaggcagaagttcagctccctgtacatctcccagttcatcatcatgtactccctggatggcaagaagtggcagacctacagaggcaacagcacaggcaccctgatggtgttctttggcaatgtggacagctctgggatcaagcacaacatcttcaacccccccatcattgccaggtacatcagactgcaccccacccactactccatcaggtccaccctgagaatggagctgatgggctgtgacctgaacagctgcagcatgcccctgggcatggagagcaaggccatctctgatgcccagatcacagccagcagctacttcaccaacatgtttgccacctggtcccccagcaaggccaggctgcacctgcagggcaggagcaatgcctggaggccccaggtgaacaaccccaaggagtggctgcaggtggacttccagaagaccatgaaggtgacaggggtgaccacccagggggtgaagtccctgctgaccagcatgtatgtgaaggagttcctgatcagcagctcccaggatggccaccagtggaccctgttcttccagaatggcaaggtgaaggtgttccagggcaaccaggacagcttcacccctgtggtgaactccctggacccccccctgctgaccagatacctgaggatccacccccagtcctgggtgcaccagattgccctgagaatggaggtgctgggctgtgaggcccaggacctgtactgattaattaagagcatcttaccgccatttattcccatatttgttctgtttttcttgatttgggtatacatttaaatgttaataaaacaaaatggtggggcaatcatttacatttttagggatatgtaattactagttcaggtgtattgccacaagacaaacatgttaagaaactttcccgttatttacgctctgttcctgttaatcaacctctggattacaaaatttgtgaaagattgactgatattcttaactatgttgctccttttacgctgtgtggatatgctgctttatagcctctgtatctagctattgcttcccgtacggctttcgttttctcctccttgtataaatcctggttgctgtctcttttagaggagttgtggcccgttgtccgtcaacgtggcgtggtgtgctctgtgtttgctgacgcaacccccactggctggggcattgccaccacctgtcaactcctttctgggactttcgctttccccctcccgatcgccacggcagaactcatcgccgcctgccttgcccgctgctggacaggggctaggttgctgggcactgataattccgtggtgttgtctgtgccttctagttgccagccatctgttgtttgcccctcccccgtgccttccttgaccctggaaggtgccactcccactgtcctttcctaataaaatgaggaaattgcatcgcattgtctgagtaggtgtcattctattctggggggtggggtggggcaggacagcaagggggaggattgggaagacaatagcaggcatgctggggatgcggtgggctctatggctctagagcatggctacgtagataagtagcatggcgggttaatcattaactacacctgcaggaggaacccctagtgatggagttggccactccctctctgcgcgctcgctcgctcactgaggccgggcgaccaaaggtcgcccgacgcccgggcggcctcagtgagcgagcgagcgcgcagctgcctgcagg

SEQ ID NO: 444 - DNA, 6073 bp, Artificial Sequence
  Description of Artificial Sequence: Synthetic polynucleotide
cctgcaggcagctgcgcgctcgctcgctcactgaggccgcccgggcaaagcccgggcgtcgggcgacctttggtcgcccggcctcagtgagcgagcgagcgcgcagagagggagtggccaactccatcactaggggttccttgtagttaatgattaacccgccatgctacttatctacgtagccatgctctagacgggggaggctgctggtgaatattaaccaaggtcaccccagttatcggaggagcaaacaggggctaagtccacacgcgtggtaccgtctgtctgcacatttcgtagagcgagtgttccgatactctaatctccctaggcaaggttcatatttgtgtaggttacttattctccttttgttgactaagtcaataatcagaatcagcaggtttggagtcagcttggcagggatcagcagcctgggttggaaggagggggtataaaagccccttcaccaggagaagccgtcacacagatccacaagctcctgaagaggtaagggtttaagggatggttggttggtggggtattaatgtttaattacctggagcacctgcctgaaatcactttttttcaggttggtttaaacgggacatcgtagagagtcgtacttacatttcgtgggctaagtttaagctactctcgctccgggataagagtttcaatgcaaattgagttatccacctgtttcttcctctgtctcctgaggttctgcttctctgccaccaggagatactacctgggggctgtggagctgtcctgggactacatgcagtcagacctgggggagctgccagttgatgccaggttcccccccagagtccccaagtccttccccttcaacacctcagtggtgtacaaaaagaccctgtttgtggagttcacagaccacctgttcaacatagccaagcccaggcccccctggatgggcctgctgggccccaccatccaggcagaggtttatgacacagtggtcatcaccctgaagaacatggcctcccaccctgtgtccctccatgctgtgggggtgagctactggaaggccagtgagggggcagaatatgatgaccagaccagccagagggagaaggaggatgacaaggtgttcccagggggcagccacacctatgtgtggcaggtcctgaaggagaatggccccatggcctctgaccccctctgcctcacctactcctacctgtcccatgtggacctggtgaaggacctcaactctggcctgattggagccctcctggtgtgcagggaggggagcctggccaaggaaaagacccagaccctgcacaagtttatcctgctctttgcagtctttgatgaggggaagtcctggcacagtgagaccaagaactccctgatgcaggacagagatgctgcctcagccagggcctggcccaagatgcacacagtgaatgggtatgtcaacaggagcctgccaggcctgattgggtgccacagaaagtcagtgtactggcatgtcattggcatgggcaccaccccagaggtgcactccatcttcctggagggccacaccttcctggtgaggaaccacagacaggccagcctggagatcagcccaatcaccttcctcacagcccagaccctcctcatggacctgggccagtttctcctgttctgccacatctcctcccaccagcatgatggcatggaggcctatgtgaaggtggacagctgccctgaggagccccagctcaggatgaagaacaatgaggaggcagaggactatgatgatgatctgacagactctgagatggatgtggtgagatttgatgatgacaacagcccctccttcatccagatcaggtctgtggccaagaagcaccctaagacctgggtgcactacattgcagctgaggaggaggactgggactatgcccccctggtcctggcccctgatgataggtcctacaagtcccagtacctgaacaatggcccccagaggatagggagaaagtacaagaaggtgaggttcatggcctacactgatgagaccttcaagactagggaagccatccagcatgagtctgggatcctgggccccctcctctatggggaggtgggggacaccctgctgatcatcttcaagaaccaggccagcaggccctacaacatttacccccatgggatcacagatgtgagacccctgtacagcaggagactgccaaagggggtgaagcacctgaaggacttccccatcctgccaggggagatcttcaagtacaagtggactgtgacagtggaggatgggcccaccaaatctgaccctagatgcctgaccagatactacagcagctttgtgaacatggagagggacctggcctctggactgattggccctctgctgatctgctacaaggagagtgtggaccagaggggaaaccagatcatgtctgacaagaggaatgtgatcctgttctcagtgtttgatgagaacagatcctggtacctcactgagaacatccagaggttcctgcccaacccagcaggggtgcagctggaggacccagagttccaggcctccaacatcatgcactccatcaatggctatgtctttgactccctgcagctgtcagtgtgcctgcatgaggtggcctactggtacatcctctccattggagcccagactgacttcctgtcagtcttcttcagtggctacaccttcaagcacaagatggtctatgaggacactctgaccctgttccccttctctggggagactgtgttcatgtccatggagaaccctggactgtggatcctgggctgccacaacagtgacttcaggaacaggggcatgactgccctgctgaaggtctccagctgtgacaagaacactggggactactatgaggactcctatgaggacatctctgcctacctgctgtccaagaacaatgccattgagcccaggtccttctcccagaacagcagacacccctccaccaggcagaagcagttcaatgcaaccaccatccctgaaaataccaccctgcagagtgaccaggaggagattgactatgatgacaccatctctgtggagatgaagaaggaggactttgacatctatgatgaggatgagaaccagagccctagaagcttccagaagaagaccagacactacttcattgctgcagtggaaagactgtgggactatgggatgagctcctccccccatgtgctgaggaacagggcccagtctggctctgtgccccagttcaagaaggtggtgttccaggagttcactgatggctccttcacccagcccctgtacaggggagagctgaatgagcacctgggcctgctgggcccctacatcagggctgaggtggaggacaatatcatggtgaccttcagaaaccaggcctccagaccttactccttctacagcagcctgatctcctatgaggaggaccagagacagggggctgagcccaggaagaactttgtgaagcccaatgagaccaagacctacttctggaaggtgcagcaccacatggcccccaccaaggatgagtttgactgcaaggcctgggcctacttctctgatgtggacctggagaaggatgtgcactctggcctgattggccccctgctggtgtgccacaccaacaccctgaaccctgcccatggcaggcaggtgactgtgcaggagtttgccctgttcttcaccatctttgatgagaccaagagctggtacttcactgagaacatggagaggaactgcagggccccctgcaacatccagatggaggaccccaccttcaaggagaactacaggttccatgccatcaatggctacatcatggacaccctgcctggcctggtgatggcccaggaccagaggatcaggtggtacctgctgagcatggggagcaatgagaacatccacagcatccacttctctggccatgtgttcacagtgaggaagaaggaggagtacaagatggccctgtacaacctgtaccctggggtgtttgagacagtggagatgctgccctccaaggctggaatctggagggtggagtgcctgattggggagcacctgcatgctggcatgagcaccctgttcctggtgtacagcaacaagtgccagacccccctgggcatggcctctggccacatcagagacttccagatcacagcctcaggccagtatggccagtgggcccccaagctggccaggctgcactactctggcagcatcaatgcctggtccaccaaggagcccttcagctggatcaaggtggacctcctggcccccatgatcatccatggcatcaagacccagggggccaggcagaagttcagctccctgtacatctcccagttcatcatcatgtactccctggatggcaagaagtggcagacctacagaggcaacagcacaggcaccctgatggtgttctttggcaatgtggacagctctgggatcaagcacaacatcttcaacccccccatcattgccaggtacatcagactgcaccccacccactactccatcaggtccaccctgagaatggagctgatgggctgtgacctgaacagctgcagcatgcccctgggcatggagagcaaggccatctctgatgcccagatcacagccagcagctacttcaccaacatgtttgccacctggtcccccagcaaggccaggctgcacctgcagggcaggagcaatgcctggaggccccaggtgaacaaccccaaggagtggctgcaggtggacttccagaagaccatgaaggtgacaggggtgaccacccagggggtgaagtccctgctgaccagcatgtatgtgaaggagttcctgatcagcagctcccaggatggccaccagtggaccctgttcttccagaatggcaaggtgaaggtgttccagggcaaccaggacagcttcacccctgtggtgaactccctggacccccccctgctgaccagatacctgaggatccacccccagtcctgggtgcaccagattgccctgagaatggaggtgctgggctgtgaggcccaggacctgtactgattaattaagagcatcttaccgccatttattcccatatttgttctgtttttcttgatttgggtatacatttaaatgttaataaaacaaaatggtggggcaatcatttacatttttagggatatgtaattactagttcaggtgtattgccacaagacaaacatgttaagaaactttcccgttatttacgctctgttcctgttaatcaacctctggattacaaaatttgtgaaagattgactgatattcttaactatgttgctccttttacgctgtgtggatatgctgctttatagcctctgtatctagctattgcttcccgtacggctttcgttttctcctccttgtataaatcctggttgctgtctcttttagaggagttgtggcccgttgtccgtcaacgtggcgtggtgtgctctgtgtttgctgacgcaacccccactggctggggcattgccaccacctgtcaactcctttctgggactttcgctttccccctcccgatcgccacggcagaactcatcgccgcctgccttgcccgctgctggacaggggctaggttgctgggcactgataattccgtggtgttgtctgtgccttctagttgccagccatctgttgtttgcccctcccccgtgccttccttgaccctggaaggtgccactcccactgtcctttcctaataaaatgaggaaattgcatcgcattgtctgagtaggtgtcattctattctggggggtggggtggggcaggacagcaagggggaggattgggaagacaatagcaggcatgctggggatgcggtgggctctatggctctagagcatggctacgtagataagtagcatggcgggttaatcattaactacacctgcaggaggaacccctagtgatggagttggccactccctctctgcgcgctcgctcgctcactgaggccgggcgaccaaaggtcgcccgacgcccgggcggcctcagtgagcgagcgagcgcgcagctgcctgcagg

SEQ ID NO: 445 - DNA, 6073 bp, Artificial Sequence
  Description of Artificial Sequence: Synthetic polynucleotide
cctgcaggcagctgcgcgctcgctcgctcactgaggccgcccgggcaaagcccgggcgtcgggcgacctttggtcgcccggcctcagtgagcgagcgagcgcgcagagagggagtggccaactccatcactaggggttccttgtagttaatgattaacccgccatgctacttatctacgtagccatgctctagacgggggaggctgctggtgaatattaaccaaggtcaccccagttatcggaggagcaaacaggggctaagtccacacgcgtggtaccgtctgtctgcacatttcgtagagcgagtgttccgatactctaatctccctaggcaaggttcatatttgtgtaggttacttattctccttttgttgactaagtcaataatcagaatcagcaggtttggagtcagcttggcagggatcagcagcctgggttggaaggagggggtataaaagccccttcaccaggagaagccgtcacacagatccacaagctcctgaagaggtaagggtttaagggatggttggttggtggggtattaatgtttaattacctggagcacctgcctgaaatcactttttttcaggttggtttaaacgggacatcgtagagagtcgtacttacatttcgtgggctaagtttaagctactctcgctccgggataagagtttcaatgcagattgagctgagcacctgcttcttcctgtgcctgctgaggttctgcttctctgccaccaggagatactacctgggggctgtggagctgagctgggactacatgcagtctgacctgggggagctgcctgtggatgccaggttcccccccagagtgcccaagagcttccccttcaacacctctgtggtgtacaagaagaccctgtttgtggagttcactgaccacctgttcaacattgccaagcccaggcccccctggatgggcctgctgggccccaccatccaggctgaggtgtatgacactgtggtgatcaccctgaagaacatggccagccaccctgtgagcctgcatgctgtgggggtgagctactggaaggcctctgagggggctgagtatgatgaccagaccagccagagggagaaggaggatgacaaggtgttccctgggggcagccacacctatgtgtggcaggtgctgaaggagaatggccccatggcctctgaccccctgtgcctgacctacagctacctgagccatgtggacctggtgaaggacctgaactctggcctgattggggccctgctggtgtgcagggagggcagcctggccaaggagaagacccagaccctgcacaagttcatcctgctgtttgctgtgtttgatgagggcaagagctggcactctgaaaccaagaacagcctgatgcaggacagggatgctgcctctgccagggcctggcccaagatgcacactgtgaatggctatgtgaacaggagcctgcctggcctgattggctgccacaggaagtctgtgtactggcatgtgattggcatgggcaccacccctgaggtgcacagcatcttcctggagggccacaccttcctggtcaggaaccacaggcaggccagcctggagatcagccccatcaccttcctgactgcccagaccctgctgatggacctgggccagttcctgctgttctgccacatcagcagccaccagcatgatggcatggaggcctatgtgaaggtggacagctgccctgaggagccccagctgaggatgaagaacaatgaggaggctgaggactatgatgatgacctgactgactctgagatggatgtggtgaggtttgatgatgacaacagccccagcttcatccagatcaggtctgtggccaagaagcaccccaagacctgggtgcactacattgctgctgaggaggaggactgggactatgcccccctggtgctggcccctgatgacaggagctacaagagccagtacctgaacaatggcccccagaggattggcaggaagtacaagaaggtcaggttcatggcctacactgatgaaaccttcaagaccagggaggccatccagcatgagtctggcatcctgggccccctgctgtatggggaggtgggggacaccctgctgatcatcttcaagaaccaggccagcaggccctacaacatctacccccatggcatcactgatgtgaggcccctgtacagcaggaggctgcccaagggggtgaagcacctgaaggacttccccatcctgcctggggagatcttcaagtacaagtggactgtgactgtggaggatggccccaccaagtctgaccccaggtgcctgaccagatactacagcagctttgtgaacatggagagggacctggcctctggcctgattggccccctgctgatctgctacaaggagtctgtggaccagaggggcaaccagatcatgtctgacaagaggaatgtgatcctgttctctgtgtttgatgagaacaggagctggtacctgactgagaacatccagaggttcctgcccaaccctgctggggtgcagctggaggaccctgagttccaggccagcaacatcatgcacagcatcaatggctatgtgtttgacagcctgcagctgtctgtgtgcctgcatgaggtggcctactggtacatcctgagcattggggcccagactgacttcctgtctgtgttcttctctggctacaccttcaagcacaagatggtgtatgaggacaccctgaccctgttccccttctctggggagactgtgttcatgagcatggagaaccctggcctgtggattctgggctgccacaactctgacttcaggaacaggggcatgactgccctgctgaaagtctccagctgtgacaagaacactggggactactatgaggacagctatgaggacatctctgcctacctgctgagcaagaacaatgccattgagcccaggagcttcagccagaatagcaggcaccccagcaccaggcagaagcagttcaatgccaccaccatcccagagaataccaccctgcagtctgaccaggaggagattgactatgatgacaccatctctgtggagatgaagaaggaggactttgacatctacgacgaggacgagaaccagagccccaggagcttccagaagaagaccaggcactacttcattgctgctgtggagaggctgtgggactatggcatgagcagcagcccccatgtgctgaggaacagggcccagtctggctctgtgccccagttcaagaaggtggtgttccaggagttcactgatggcagcttcacccagcccctgtacagaggggagctgaatgagcacctgggcctgctgggcccctacatcagggctgaggtggaggacaacatcatggtgaccttcaggaaccaggccagcaggccctacagcttctacagcagcctgatcagctatgaggaggaccagaggcagggggctgagcccaggaagaactttgtgaagcccaatgaaaccaagacctacttctggaaggtgcagcaccacatggcccccaccaaggatgagtttgactgcaaggcctgggcctacttctctgatgtggacctggagaaggatgtgcactctggcctgattggccccctgctggtgtgccacaccaacaccctgaaccctgcccatggcaggcaggtgactgtgcaggagtttgccctgttcttcaccatctttgatgaaaccaagagctggtacttcactgagaacatggagaggaactgcagggccccctgcaacatccagatggaggaccccaccttcaaggagaactacaggttccatgccatcaatggctacatcatggacaccctgcctggcctggtgatggcccaggaccagaggatcaggtggtacctgctgagcatgggcagcaatgagaacatccacagcatccacttctctggccatgtgttcactgtgaggaagaaggaggagtacaagatggccctgtacaacctgtaccctggggtgtttgagactgtggagatgctgcccagcaaggctggcatctggagggtggagtgcctgattggggagcacctgcatgctggcatgagcaccctgttcctggtgtacagcaacaagtgccagacccccctgggcatggcctctggccacatcagggacttccagatcactgcctctggccagtatggccagtgggcccccaagctggccaggctgcactactctggcagcatcaatgcctggagcaccaaggagcccttcagctggatcaaggtggacctgctggcccccatgatcatccatggcatcaagacccagggggccaggcagaagttcagcagcctgtacatcagccagttcatcatcatgtacagcctggatggcaagaagtggcagacctacaggggcaacagcactggcaccctgatggtgttctttggcaatgtggacagctctggcatcaagcacaacatcttcaacccccccatcattgccagatacatcaggctgcaccccacccactacagcatcaggagcaccctgaggatggagctgatgggctgtgacctgaacagctgcagcatgcccctgggcatggagagcaaggccatctctgatgcccagatcactgccagcagctacttcaccaacatgtttgccacctggagccccagcaaggccaggctgcacctgcagggcaggagcaatgcctggaggccccaggtcaacaaccccaaggagtggctgcaggtggacttccagaagaccatgaaggtgactggggtgaccacccagggggtgaagagcctgctgaccagcatgtatgtgaaggagttcctgatcagcagcagccaggatggccaccagtggaccctgttcttccagaatggcaaggtgaaggtgttccagggcaaccaggacagcttcacccctgtggtgaacagcctggacccccccctgctgaccagatacctgaggattcacccccagagctgggtgcaccagattgccctgaggatggaggtgctgggctgtgaggcccaggacctgtactgattaattaagagcatcttaccgccatttattcccatatttgttctgtttttcttgatttgggtatacatttaaatgttaataaaacaaaatggtggggcaatcatttacatttttagggatatgtaattactagttcaggtgtattgccacaagacaaacatgttaagaaactttcccgttatttacgctctgttcctgttaatcaacctctggattacaaaatttgtgaaagattgactgatattcttaactatgttgctccttttacgctgtgtggatatgctgctttatagcctctgtatctagctattgcttcccgtacggctttcgttttctcctccttgtataaatcctggttgctgtctcttttagaggagttgtggcccgttgtccgtcaacgtggcgtggtgtgctctgtgtttgctgacgcaacccccactggctggggcattgccaccacctgtcaactcctttctgggactttcgctttccccctcccgatcgccacggcagaactcatcgccgcctgccttgcccgctgctggacaggggctaggttgctgggcactgataattccgtggtgttgtctgtgccttctagttgccagccatctgttgtttgcccctcccccgtgccttccttgaccctggaaggtgccactcccactgtcctttcctaataaaatgaggaaattgcatcgcattgtctgagtaggtgtcattctattctggggggtggggtggggcaggacagcaagggggaggattgggaagacaatagcaggcatgctggggatgcggtgggctctatggctctagagcatggctacgtagataagtagcatggcgggttaatcattaactacacctgcaggaggaacccctagtgatggagttggccactccctctctgcgcgctcgctcgctcactgaggccgggcgaccaaaggtcgcccgacgcccgggcggcctcagtgagcgagcgagcgcgcagctgcctgcagg

SEQ ID NO: 446 - DNA, 6476 bp, Artificial Sequence
  Description of Artificial Sequence: Synthetic polynucleotide
cctgcaggcagctgcgcgctcgctcgctcactgaggccgcccgggcaaagcccgggcgtcgggcgacctttggtcgcccggcctcagtgagcgagcgagcgcgcagagagggagtggccaactccatcactaggggttccttgtagttaatgattaacccgccatgctacttatcgcggccgcaacaggttagtttgactagcgttaatcattaacgttaatcattaacgttaatcattaacgttaatcattaacgttaatcattaacatcgatgcgagaacttgtgcctccccgtgttcctgctctttgtccctctgtcctacttagactaatatttgccttgggtactgcaaacaggaaatgggggagggacaggagtagggcggagggtagttaagaatgtcaattggggggaggctgctggtgaatattaaccaaggtcaccccagttatcggaggagcaaacaggggctaagtccaccgggggaggctgctggtgaatattaaccaaggtcaccccagttatcggaggagcaaacaggggctaagtccaccgggggaggctgctggtgaatattaaccaaggtcaccccagttatcggaggagcaaacaggggctaagtccacggtacccactgggaggatgttgagtaagatggaaaactactgatgacccttgcagagacagagtattaggacatgtttgaacaggggccgggcgatcagcaggtagcactagaggatccccgtctgtctgcacatttcgtagagcgagtgttccgatactctaatctccctaggcaaggttcatatttgtgtaggttacttattctccttttgttgactaagtcaataatcagaatcagcaggtttggagtcagcttggcagggatcagcagcctgggttggaaggagggggtataaaagccccttcaccaggagaagccgtcacacagatccacaagctcctgaagaggtaagggtttaagggatggttggttggtggggtattaatgtttaattacctggagcacctgcctgaaatcactttttttcaggttggttaaacgccgccaccatgcagattgagctgagcacctgcttcttcctgtgcctgctgaggttctgcttctctgccaccaggagatactacctgggggctgtggagctgagctgggactacatgcagtctgacctgggggagctgcctgtggatgccaggttcccccccagagtgcccaagagcttccccttcaacacctctgtggtgtacaagaagaccctgtttgtggagttcactgaccacctgttcaacattgccaagcccaggcccccctggatgggcctgctgggccccaccatccaggctgaggtgtatgacactgtggtgatcaccctgaagaacatggccagccaccctgtgagcctgcatgctgtgggggtgagctactggaaggcctctgagggggctgagtatgatgaccagaccagccagagggagaaggaggatgacaaggtgttccctgggggcagccacacctatgtgtggcaggtgctgaaggagaatggccccatggcctctgaccccctgtgcctgacctacagctacctgagccatgtggacctggtgaaggacctgaactctggcctgattggggccctgctggtgtgcagggagggcagcctggccaaggagaagacccagaccctgcacaagttcatcctgctgtttgctgtgtttgatgagggcaagagctggcactctgaaaccaagaacagcctgatgcaggacagggatgctgcctctgccagggcctggcccaagatgcacactgtgaatggctatgtgaacaggagcctgcctggcctgattggctgccacaggaagtctgtgtactggcatgtgattggcatgggcaccacccctgaggtgcacagcatcttcctggagggccacaccttcctggtcaggaaccacaggcaggccagcctggagatcagccccatcaccttcctgactgcccagaccctgctgatggacctgggccagttcctgctgttctgccacatcagcagccaccagcatgatggcatggaggcctatgtgaaggtggacagctgccctgaggagccccagctgaggatgaagaacaatgaggaggctgaggactatgatgatgacctgactgactctgagatggatgtggtgaggtttgatgatgacaacagccccagcttcatccagatcaggtctgtggccaagaagcaccccaagacctgggtgcactacattgctgctgaggaggaggactgggactatgcccccctggtgctggcccctgatgacaggagctacaagagccagtacctgaacaatggcccccagaggattggcaggaagtacaagaaggtcaggttcatggcctacactgatgaaaccttcaagaccagggaggccatccagcatgagtctggcatcctgggccccctgctgtatggggaggtgggggacaccctgctgatcatcttcaagaaccaggccagcaggccctacaacatctacccccatggcatcactgatgtgaggcccctgtacagcaggaggctgcccaagggggtgaagcacctgaaggacttccccatcctgcctggggagatcttcaagtacaagtggactgtgactgtggaggatggccccaccaagtctgaccccaggtgcctgaccagatactacagcagctttgtgaacatggagagggacctggcctctggcctgattggccccctgctgatctgctacaaggagtctgtggaccagaggggcaaccagatcatgtctgacaagaggaatgtgatcctgttctctgtgtttgatgagaacaggagctggtacctgactgagaacatccagaggttcctgcccaaccctgctggggtgcagctggaggaccctgagttccaggccagcaacatcatgcacagcatcaatggctatgtgtttgacagcctgcagctgtctgtgtgcctgcatgaggtggcctactggtacatcctgagcattggggcccagactgacttcctgtctgtgttcttctctggctacaccttcaagcacaagatggtgtatgaggacaccctgaccctgttccccttctctggggagactgtgttcatgagcatggagaaccctggcctgtggattctgggctgccacaactctgacttcaggaacaggggcatgactgccctgctgaaagtctccagctgtgacaagaacactggggactactatgaggacagctatgaggacatctctgcctacctgctgagcaagaacaatgccattgagcccaggagcttcagccagaatagcaggcaccccagcaccaggcagaagcagttcaatgccaccaccatcccagagaataccaccctgcagtctgaccaggaggagattgactatgatgacaccatctctgtggagatgaagaaggaggactttgacatctacgacgaggacgagaaccagagccccaggagcttccagaagaagaccaggcactacttcattgctgctgtggagaggctgtgggactatggcatgagcagcagcccccatgtgctgaggaacagggcccagtctggctctgtgccccagttcaagaaggtggtgttccaggagttcactgatggcagcttcacccagcccctgtacagaggggagctgaatgagcacctgggcctgctgggcccctacatcagggctgaggtggaggacaacatcatggtgaccttcaggaaccaggccagcaggccctacagcttctacagcagcctgatcagctatgaggaggaccagaggcagggggctgagcccaggaagaactttgtgaagcccaatgaaaccaagacctacttctggaaggtgcagcaccacatggcccccaccaaggatgagtttgactgcaaggcctgggcctacttctctgatgtggacctggagaaggatgtgcactctggcctgattggccccctgctggtgtgccacaccaacaccctgaaccctgcccatggcaggcaggtgactgtgcaggagtttgccctgttcttcaccatctttgatgaaaccaagagctggtacttcactgagaacatggagaggaactgcagggccccctgcaacatccagatggaggaccccaccttcaaggagaactacaggttccatgccatcaatggctacatcatggacaccctgcctggcctggtgatggcccaggaccagaggatcaggtggtacctgctgagcatgggcagcaatgagaacatccacagcatccacttctctggccatgtgttcactgtgaggaagaaggaggagtacaagatggccctgtacaacctgtaccctggggtgtttgagactgtggagatgctgcccagcaaggctggcatctggagggtggagtgcctgattggggagcacctgcatgctggcatgagcaccctgttcctggtgtacagcaacaagtgccagacccccctgggcatggcctctggccacatcagggacttccagatcactgcctctggccagtatggccagtgggcccccaagctggccaggctgcactactctggcagcatcaatgcctggagcaccaaggagcccttcagctggatcaaggtggacctgctggcccccatgatcatccatggcatcaagacccagggggccaggcagaagttcagcagcctgtacatcagccagttcatcatcatgtacagcctggatggcaagaagtggcagacctacaggggcaacagcactggcaccctgatggtgttctttggcaatgtggacagctctggcatcaagcacaacatcttcaacccccccatcattgccagatacatcaggctgcaccccacccactacagcatcaggagcaccctgaggatggagctgatgggctgtgacctgaacagctgcagcatgcccctgggcatggagagcaaggccatctctgatgcccagatcactgccagcagctacttcaccaacatgtttgccacctggagccccagcaaggccaggctgcacctgcagggcaggagcaatgcctggaggccccaggtcaacaaccccaaggagtggctgcaggtggacttccagaagaccatgaaggtgactggggtgaccacccagggggtgaagagcctgctgaccagcatgtatgtgaaggagttcctgatcagcagcagccaggatggccaccagtggaccctgttcttccagaatggcaaggtgaaggtgttccagggcaaccaggacagcttcacccctgtggtgaacagcctggacccccccctgctgaccagatacctgaggattcacccccagagctgggtgcaccagattgccctgaggatggaggtgctgggctgtgaggcccaggacctgtactgattaattaagagcatcttaccgccatttattcccatatttgttctgtttttcttgatttgggtatacatttaaatgttaataaaacaaaatggtggggcaatcatttacatttttagggatatgtaattactagttcaggtgtattgccacaagacaaacatgttaagaaactttcccgttatttacgctctgttcctgttaatcaacctctggattacaaaatttgtgaaagattgactgatattcttaactatgttgctccttttacgctgtgtggatatgctgctttatagcctctgtatctagctattgcttcccgtacggctttcgttttctcctccttgtataaatcctggttgctgtctcttttagaggagttgtggcccgttgtccgtcaacgtggcgtggtgtgctctgtgtttgctgacgcaacccccactggctggggcattgccaccacctgtcaactcctttctgggactttcgctttccccctcccgatcgccacggcagaactcatcgccgcctgccttgcccgctgctggacaggggctaggttgctgggcactgataattccgtggtgttgtctgtgccttctagttgccagccatctgttgtttgcccctcccccgtgccttccttgaccctggaaggtgccactcccactgtcctttcctaataaaatgaggaaattgcatcgcattgtctgagtaggtgtcattctattctggggggtggggtggggcaggacagcaagggggaggattgggaagacaatagcaggcatgctggggatgcggtgggctctatggctctagagcatggctacgtagataagtagcatggcgggttaatcattaactacacctgcaggaggaacccctagtgatggagttggccactccctctctgcgcgctcgctcgctcactgaggccgggcgaccaaaggtcgcccgacgcccgggcggcctcagtgagcgagcgagcgcgcagctgcctgcagg

SEQ ID NO: 447 - DNA, 6543 bp, Artificial Sequence
  Description of Artificial Sequence: Synthetic polynucleotide
cctgcaggcagctgcgcgctcgctcgctcactgaggccgcccgggcaaagcccgggcgtcgggcgacctttggtcgcccggcctcagtgagcgagcgagcgcgcagagagggagtggccaactccatcactaggggttccttgtagttaatgattaacccgccatgctacttatcgcggccgcaacaggttagtttgactagcgttaatcattaacgttaatcattaacgttaatcattaacgttaatcattaacgttaatcattaacatcgatgcgagaacttgtgcctccccgtgttcctgctctttgtccctctgtcctacttagactaatatttgccttgggtactgcaaacaggaaatgggggagggacaggagtagggcggagggtagttaagaatgtcaattggggggaggctgctggtgaatattaaccaaggtcaccccagttatcggaggagcaaacaggggctaagtccaccgggggaggctgctggtgaatattaaccaaggtcaccccagttatcggaggagcaaacaggggctaagtccaccgggggaggctgctggtgaatattaaccaaggtcaccccagttatcggaggagcaaacaggggctaagtccacggtacccactgggaggatgttgagtaagatggaaaactactgatgacccttgcagagacagagtattaggacatgtttgaacaggggccgggcgatcagcaggtagcactagaggatccccgtctgtctgcacatttcgtagagcgagtgttccgatactctaatctccctaggcaaggttcatatttgtgtaggttacttattctccttttgttgactaagtcaataatcagaatcagcaggtttggagtcagcttggcagggatcagcagcctgggttggaaggagggggtataaaagccccttcaccaggagaagccgtcacacagatccacaagctcctgaagaggtaagggtttaagggatggttggttggtggggtattaatgtttaattacctggagcacctgcctgaaatcactttttttcaggttggtttaaacgggacatcgtagagagtcgtacttacatttcgtgggctaagtttaagctactctcgctccgggataagagtttcaatgcagattgagctgagcacctgcttcttcctgtgcctgctgaggttctgcttctctgccaccaggagatactacctgggggctgtggagctgagctgggactacatgcagtctgacctgggggagctgcctgtggatgccaggttcccccccagagtgcccaagagcttccccttcaacacctctgtggtgtacaagaagaccctgtttgtggagttcactgaccacctgttcaacattgccaagcccaggcccccctggatgggcctgctgggccccaccatccaggctgaggtgtatgacactgtggtgatcaccctgaagaacatggccagccaccctgtgagcctgcatgctgtgggggtgagctactggaaggcctctgagggggctgagtatgatgaccagaccagccagagggagaaggaggatgacaaggtgttccctgggggcagccacacctatgtgtggcaggtgctgaaggagaatggccccatggcctctgaccccctgtgcctgacctacagctacctgagccatgtggacctggtgaaggacctgaactctggcctgattggggccctgctggtgtgcagggagggcagcctggccaaggagaagacccagaccctgcacaagttcatcctgctgtttgctgtgtttgatgagggcaagagctggcactctgaaaccaagaacagcctgatgcaggacagggatgctgcctctgccagggcctggcccaagatgcacactgtgaatggctatgtgaacaggagcctgcctggcctgattggctgccacaggaagtctgtgtactggcatgtgattggcatgggcaccacccctgaggtgcacagcatcttcctggagggccacaccttcctggtcaggaaccacaggcaggccagcctggagatcagccccatcaccttcctgactgcccagaccctgctgatggacctgggccagttcctgctgttctgccacatcagcagccaccagcatgatggcatggaggcctatgtgaaggtggacagctgccctgaggagccccagctgaggatgaagaacaatgaggaggctgaggactatgatgatgacctgactgactctgagatggatgtggtgaggtttgatgatgacaacagccccagcttcatccagatcaggtctgtggccaagaagcaccccaagacctgggtgcactacattgctgctgaggaggaggactgggactatgcccccctggtgctggcccctgatgacaggagctacaagagccagtacctgaacaatggcccccagaggattggcaggaagtacaagaaggtcaggttcatggcctacactgatgaaaccttcaagaccagggaggccatccagcatgagtctggcatcctgggccccctgctgtatggggaggtgggggacaccctgctgatcatcttcaagaaccaggccagcaggccctacaacatctacccccatggcatcactgatgtgaggcccctgtacagcaggaggctgcccaagggggtgaagcacctgaaggacttccccatcctgcctggggagatcttcaagtacaagtggactgtgactgtggaggatggccccaccaagtctgaccccaggtgcctgaccagatactacagcagctttgtgaacatggagagggacctggcctctggcctgattggccccctgctgatctgctacaaggagtctgtggaccagaggggcaaccagatcatgtctgacaagaggaatgtgatcctgttctctgtgtttgatgagaacaggagctggtacctgactgagaacatccagaggttcctgcccaaccctgctggggtgcagctggaggaccctgagttccaggccagcaacatcatgcacagcatcaatggctatgtgtttgacagcctgcagctgtctgtgtgcctgcatgaggtggcctactggtacatcctgagcattggggcccagactgacttcctgtctgtgttcttctctggctacaccttcaagcacaagatggtgtatgaggacaccctgaccctgttccccttctctggggagactgtgttcatgagcatggagaaccctggcctgtggattctgggctgccacaactctgacttcaggaacaggggcatgactgccctgctgaaagtctccagctgtgacaagaacactggggactactatgaggacagctatgaggacatctctgcctacctgctgagcaagaacaatgccattgagcccaggagcttcagccagaatagcaggcaccccagcaccaggcagaagcagttcaatgccaccaccatcccagagaataccaccctgcagtctgaccaggaggagattgactatgatgacaccatctctgtggagatgaagaaggaggactttgacatctacgacgaggacgagaaccagagccccaggagcttccagaagaagaccaggcactacttcattgctgctgtggagaggctgtgggactatggcatgagcagcagcccccatgtgctgaggaacagggcccagtctggctctgtgccccagttcaagaaggtggtgttccaggagttcactgatggcagcttcacccagcccctgtacagaggggagctgaatgagcacctgggcctgctgggcccctacatcagggctgaggtggaggacaacatcatggtgaccttcaggaaccaggccagcaggccctacagcttctacagcagcctgatcagctatgaggaggaccagaggcagggggctgagcccaggaagaactttgtgaagcccaatgaaaccaagacctacttctggaaggtgcagcaccacatggcccccaccaaggatgagtttgactgcaaggcctgggcctacttctctgatgtggacctggagaaggatgtgcactctggcctgattggccccctgctggtgtgccacaccaacaccctgaaccctgcccatggcaggcaggtgactgtgcaggagtttgccctgttcttcaccatctttgatgaaaccaagagctggtacttcactgagaacatggagaggaactgcagggccccctgcaacatccagatggaggaccccaccttcaaggagaactacaggttccatgccatcaatggctacatcatggacaccctgcctggcctggtgatggcccaggaccagaggatcaggtggtacctgctgagcatgggcagcaatgagaacatccacagcatccacttctctggccatgtgttcactgtgaggaagaaggaggagtacaagatggccctgtacaacctgtaccctggggtgtttgagactgtggagatgctgcccagcaaggctggcatctggagggtggagtgcctgattggggagcacctgcatgctggcatgagcaccctgttcctggtgtacagcaacaagtgccagacccccctgggcatggcctctggccacatcagggacttccagatcactgcctctggccagtatggccagtgggcccccaagctggccaggctgcactactctggcagcatcaatgcctggagcaccaaggagcccttcagctggatcaaggtggacctgctggcccccatgatcatccatggcatcaagacccagggggccaggcagaagttcagcagcctgtacatcagccagttcatcatcatgtacagcctggatggcaagaagtggcagacctacaggggcaacagcactggcaccctgatggtgttctttggcaatgtggacagctctggcatcaagcacaacatcttcaacccccccatcattgccagatacatcaggctgcaccccacccactacagcatcaggagcaccctgaggatggagctgatgggctgtgacctgaacagctgcagcatgcccctgggcatggagagcaaggccatctctgatgcccagatcactgccagcagctacttcaccaacatgtttgccacctggagccccagcaaggccaggctgcacctgcagggcaggagcaatgcctggaggccccaggtcaacaaccccaaggagtggctgcaggtggacttccagaagaccatgaaggtgactggggtgaccacccagggggtgaagagcctgctgaccagcatgtatgtgaaggagttcctgatcagcagcagccaggatggccaccagtggaccctgttcttccagaatggcaaggtgaaggtgttccagggcaaccaggacagcttcacccctgtggtgaacagcctggacccccccctgctgaccagatacctgaggattcacccccagagctgggtgcaccagattgccctgaggatggaggtgctgggctgtgaggcccaggacctgtactgattaattaagagcatcttaccgccatttattcccatatttgttctgtttttcttgatttgggtatacatttaaatgttaataaaacaaaatggtggggcaatcatttacatttttagggatatgtaattactagttcaggtgtattgccacaagacaaacatgttaagaaactttcccgttatttacgctctgttcctgttaatcaacctctggattacaaaatttgtgaaagattgactgatattcttaactatgttgctccttttacgctgtgtggatatgctgctttatagcctctgtatctagctattgcttcccgtacggctttcgttttctcctccttgtataaatcctggttgctgtctcttttagaggagttgtggcccgttgtccgtcaacgtggcgtggtgtgctctgtgtttgctgacgcaacccccactggctggggcattgccaccacctgtcaactcctttctgggactttcgctttccccctcccgatcgccacggcagaactcatcgccgcctgccttgcccgctgctggacaggggctaggttgctgggcactgataattccgtggtgttgtctgtgccttctagttgccagccatctgttgtttgcccctcccccgtgccttccttgaccctggaaggtgccactcccactgtcctttcctaataaaatgaggaaattgcatcgcattgtctgagtaggtgtcattctattctggggggtggggtggggcaggacagcaagggggaggattgggaagacaatagcaggcatgctggggatgcggtgggctctatggctctagagcatggctacgtagataagtagcatggcgggttaatcattaactacacctgcaggaggaacccctagtgatggagttggccactccctctctgcgcgctcgctcgctcactgaggccgggcgaccaaaggtcgcccgacgcccgggcggcctcagtgagcgagcgagcgcgcagctgcctgcagg

SEQ ID NO: 448 - DNA, 6478 bp, Artificial Sequence
  Description of Artificial Sequence: Synthetic polynucleotide
cctgcaggcagctgcgcgctcgctcgctcactgaggccgcccgggcaaagcccgggcgtcgggcgacctttggtcgcccggcctcagtgagcgagcgagcgcgcagagagggagtggccaactccatcactaggggttccttgtagttaatgattaacccgccatgctacttatcgcggccgcaacaggttagtttgactagcgttaatcattaacgttaatcattaacgttaatcattaacgttaatcattaacgttaatcattaacatcgatgcgagaacttgtgcctccccgtgttcctgctctttgtccctctgtcctacttagactaatatttgccttgggtactgcaaacaggaaatgggggagggacaggagtagggcggagggtagttaagaatgtcaattggggggaggctgctggtgaatattaaccaaggtcaccccagttatcggaggagcaaacaggggctaagtccaccgggggaggctgctggtgaatattaaccaaggtcaccccagttatcggaggagcaaacaggggctaagtccaccgggggaggctgctggtgaatattaaccaaggtcaccccagttatcggaggagcaaacaggggctaagtccacggtacccactgggaggatgttgagtaagatggaaaactactgatgacccttgcagagacagagtattaggacatgtttgaacaggggccgggcgatcagcaggtagcactagaggatccccgtctgtctgcacatttcgtagagcgagtgttccgatactctaatctccctaggcaaggttcatatttgtgtaggttacttattctccttttgttgactaagtcaataatcagaatcagcaggtttggagtcagcttggcagggatcagcagcctgggttggaaggagggggtataaaagccccttcaccaggagaagccgtcacacagatccacaagctcctgaagaggtaagggtttaagggatggttggttggtggggtattaatgtttaattacctggagcacctgcctgaaatcactttttttcaggttgggtttaaacgccgccaccatgcagattgagctgagcacctgcttcttcctgtgcctgctgaggttctgcttctctgccaccaggagatactacctgggggctgtggagctgagctgggactacatgcagtctgacctgggggagctgcctgtggatgccaggttcccccccagagtgcccaagagcttccccttcaacacctctgtggtgtacaagaagaccctgtttgtggagttcactgaccacctgttcaacattgccaagcccaggcccccctggatgggcctgctgggccccaccatccaggctgaggtgtatgacactgtggtgatcaccctgaagaacatggccagccaccctgtgagcctgcatgctgtgggggtgagctactggaaggcctctgagggggctgagtatgatgaccagaccagccagagggagaaggaggatgacaaggtgttccctgggggcagccacacctatgtgtggcaggtgctgaaggagaatggccccatggcctctgaccccctgtgcctgacctacagctacctgagccatgtggacctggtgaaggacctgaactctggcctgattggggccctgctggtgtgcagggagggcagcctggccaaggagaagacccagaccctgcacaagttcatcctgctgtttgctgtgtttgatgagggcaagagctggcactctgaaaccaagaacagcctgatgcaggacagggatgctgcctctgccagggcctggcccaagatgcacactgtgaatggctatgtgaacaggagcctgcctggcctgattggctgccacaggaagtctgtgtactggcatgtgattggcatgggcaccacccctgaggtgcacagcatcttcctggagggccacaccttcctggtcaggaaccacaggcaggccagcctggagatcagccccatcaccttcctgactgcccagaccctgctgatggacctgggccagttcctgctgttctgccacatcagcagccaccagcatgatggcatggaggcctatgtgaaggtggacagctgccctgaggagccccagctgaggatgaagaacaatgaggaggctgaggactatgatgatgacctgactgactctgagatggatgtggtgaggtttgatgatgacaacagccccagcttcatccagatcaggtctgtggccaagaagcaccccaagacctgggtgcactacattgctgctgaggaggaggactgggactatgcccccctggtgctggcccctgatgacaggagctacaagagccagtacctgaacaatggcccccagaggattggcaggaagtacaagaaggtcaggttcatggcctacactgatgaaaccttcaagaccagggaggccatccagcatgagtctggcatcctgggccccctgctgtatggggaggtgggggacaccctgctgatcatcttcaagaaccaggccagcaggccctacaacatctacccccatggcatcactgatgtgaggcccctgtacagcaggaggctgcccaagggggtgaagcacctgaaggacttccccatcctgcctggggagatcttcaagtacaagtggactgtgactgtggaggatggccccaccaagtctgaccccaggtgcctgaccagatactacagcagctttgtgaacatggagagggacctggcctctggcctgattggccccctgctgatctgctacaaggagtctgtggaccagaggggcaaccagatcatgtctgacaagaggaatgtgatcctgttctctgtgtttgatgagaacaggagctggtacctgactgagaacatccagaggttcctgcccaaccctgctggggtgcagctggaggaccctgagttccaggccagcaacatcatgcacagcatcaatggctatgtgtttgacagcctgcagctgtctgtgtgcctgcatgaggtggcctactggtacatcctgagcattggggcccagactgacttcctgtctgtgttcttctctggctacaccttcaagcacaagatggtgtatgaggacaccctgaccctgttccccttctctggggagactgtgttcatgagcatggagaaccctggcctgtggattctgggctgccacaactctgacttcaggaacaggggcatgactgccctgctgaaagtctccagctgtgacaagaacactggggactactatgaggacagctatgaggacatctctgcctacctgctgagcaagaacaatgccattgagcccaggagcttcagccagaatagcaggcaccccagcaccaggcagaagcagttcaatgccaccaccatcccagagaataccaccctgcagtctgaccaggaggagattgactatgatgacaccatctctgtggagatgaagaaggaggactttgacatctacgacgaggacgagaaccagagccccaggagcttccagaagaagaccaggcactacttcattgctgctgtggagaggctgtgggactatggcatgagcagcagcccccatgtgctgaggaacagggcccagtctggctctgtgccccagttcaagaaggtggtgttccaggagttcactgatggcagcttcacccagcccctgtacagaggggagctgaatgagcacctgggcctgctgggcccctacatcagggctgaggtggaggacaacatcatggtgaccttcaggaaccaggccagcaggccctacagcttctacagcagcctgatcagctatgaggaggaccagaggcagggggctgagcccaggaagaactttgtgaagcccaatgaaaccaagacctacttctggaaggtgcagcaccacatggcccccaccaaggatgagtttgactgcaaggcctgggcctacttctctgatgtggacctggagaaggatgtgcactctggcctgattggccccctgctggtgtgccacaccaacaccctgaaccctgcccatggcaggcaggtgactgtgcaggagtttgccctgttcttcaccatctttgatgaaaccaagagctggtacttcactgagaacatggagaggaactgcagggccccctgcaacatccagatggaggaccccaccttcaaggagaactacaggttccatgccatcaatggctacatcatggacaccctgcctggcctggtgatggcccaggaccagaggatcaggtggtacctgctgagcatgggcagcaatgagaacatccacagcatccacttctctggccatgtgttcactgtgaggaagaaggaggagtacaagatggccctgtacaacctgtaccctggggtgtttgagactgtggagatgctgcccagcaaggctggcatctggagggtggagtgcctgattggggagcacctgcatgctggcatgagcaccctgttcctggtgtacagcaacaagtgccagacccccctgggcatggcctctggccacatcagggacttccagatcactgcctctggccagtatggccagtgggcccccaagctggccaggctgcactactctggcagcatcaatgcctggagcaccaaggagcccttcagctggatcaaggtggacctgctggcccccatgatcatccatggcatcaagacccagggggccaggcagaagttcagcagcctgtacatcagccagttcatcatcatgtacagcctggatggcaagaagtggcagacctacaggggcaacagcactggcaccctgatggtgttctttggcaatgtggacagctctggcatcaagcacaacatcttcaacccccccatcattgccagatacatcaggctgcaccccacccactacagcatcaggagcaccctgaggatggagctgatgggctgtgacctgaacagctgcagcatgcccctgggcatggagagcaaggccatctctgatgcccagatcactgccagcagctacttcaccaacatgtttgccacctggagccccagcaaggccaggctgcacctgcagggcaggagcaatgcctggaggccccaggtcaacaaccccaaggagtggctgcaggtggacttccagaagaccatgaaggtgactggggtgaccacccagggggtgaagagcctgctgaccagcatgtatgtgaaggagttcctgatcagcagcagccaggatggccaccagtggaccctgttcttccagaatggcaaggtgaaggtgttccagggcaaccaggacagcttcacccctgtggtgaacagcctggacccccccctgctgaccagatacctgaggattcacccccagagctgggtgcaccagattgccctgaggatggaggtgctgggctgtgaggcccaggacctgtactgattaattaagagcatcttaccgccatttattcccatatttgttctgtttttcttgatttgggtatacatttaaatgttaataaaacaaaatggtggggcaatcatttacatttttagggatatgtaattactagttcaggtgtattgccacaagacaaacatgttaagaaactttcccgttatttacgctctgttcctgttaatcaacctctggattacaaaatttgtgaaagattgactgatattcttaactatgttgctccttttacgctgtgtggatatgctgctttatagcctctgtatctagctattgcttcccgtacggctttcgttttctcctccttgtataaatcctggttgctgtctcttttagaggagttgtggcccgttgtccgtcaacgtggcgtggtgtgctctgtgtttgctgacgcaacccccactggctggggcattgccaccacctgtcaactcctttctgggactttcgctttccccctcccgatcgccacggcagaactcatcgccgcctgccttgcccgctgctggacaggggctaggttgctgggcactgataattccgtggtgttgtctgtgccttctagttgccagccatctgttgtttgcccctcccccgtgccttccttgaccctggaaggtgccactcccactgtcctttcctaataaaatgaggaaattgcatcgcattgtctgagtaggtgtcattctattctggggggtggggtggggcaggacagcaagggggaggattgggaagacaatagcaggcatgctggggatgcggtgggctctatggctctagagcatggctacgtagataagtagcatggcgggttaatcattaactacacctgcaggaggaacccctagtgatggagttggccactccctctctgcgcgctcgctcgctcactgaggccgggcgaccaaaggtcgcccgacgcccgggcggcctcagtgagcgagcgagcgcgcagctgcctgcagg

SEQ ID NO: 449 - DNA, 6271 bp, Artificial Sequence
  Description of Artificial Sequence: Synthetic polynucleotide
cctgcaggcagctgcgcgctcgctcgctcactgaggccgcccgggcaaagcccgggcgtcgggcgacctttggtcgcccggcctcagtgagcgagcgagcgcgcagagagggagtggccaactccatcactaggggttccttgtagttaatgattaacccgccatgctacttatcgcggccgcagcaacagatcattctatgggttaatcattaacaacaggttaggcttgtactttggtacattggctcctagttaatcattaacttagcaatgtgcttgtactttggtacatagttacctagttaatcattaacaaacagtatggcttgtactttggtacaagcaacagatcattctatgggcgagaacttgtgcctccccgtgttcctgctctttgtccctctgtcctacttagactaatatttgccttgggtactgcaaacaggaaatgggggagggacaggagtagggcggagggtagcaattggattctgcagtgagagcagagggccagctaagtggtactctcccagagactgtctgactcacgccaccccctccaccttggacacaggacgctgtggtttctgagccaggtacaatgactcctttcggtaagtgcagtggaagctgtacactgcccaggcaaagcgtccgggcagcgtaggcgggcgactcagatcccagccagtggacttagcccctgtttgctcctccgataactggggtgaccttggttaatattcaccagcagcctcccccgttgcccctctggatccactgcttaaatacggacgaggacagggccctgtctcctcagcttcaggcaccaccactgacctgggacagtgaatgtttaaaccgcagccaccatgcagattgaactctccacctgtttcttcctgtgcctgctgagattctgcttcagtgccaccaggaggtactacttgggtgcagtggagctctcctgggactacatgcagtcagacctgggagagctccctgtggatgccaggttccctccaagggtccctaaatccttccccttcaacacctcagtggtgtacaagaaaaccctgtttgtggaattcactgaccacctgttcaacattgccaagcccaggccaccctggatggggctcctgggcccaaccatccaagctgaagtgtatgacactgtggtcatcaccctcaagaacatggcctcccaccctgtctccctgcatgctgtgggagtgtcctactggaaggcctcagagggggctgagtatgatgaccagacctcccagagggaaaaggaagatgacaaggtgttcccaggaggatcccacacctatgtgtggcaagtcctgaaggaaaatggtcccatggcatcagaccccttgtgcttgacctactcctacctgagccatgtggacctggtcaaggacctgaactcaggccttattggagccctgcttgtatgcagagagggcagcctggccaaggaaaagacccagaccctgcacaagttcatcctcctgtttgctgtgtttgatgaaggaaagtcctggcactcagagactaagaacagcctgatgcaggacagggatgcagcatcagccagagcctggcccaagatgcacactgtgaatggatatgtgaacaggtccctccctggactaattggatgccacagaaagtctgtgtactggcatgtcattggaatgggcacaacccctgaagtgcatagcatcttcctggaaggacacaccttcctggtcaggaaccacagacaggcatccctggagatctccccaatcaccttcctgactgcccagactctcctgatggacctgggacagttcttgcttttctgccacatctcctcccaccaacatgatggcatggaagcctatgtgaaggtggactcctgccctgaggaacctcaactgaggatgaaaaacaatgaagaagctgaagattatgatgatgacctgactgactcagagatggatgttgtcagatttgatgatgacaacagccctagcttcatccagattagatctgtggccaagaagcaccccaagacctgggtgcactacattgctgctgaggaagaggactgggactatgcccccctggtgctggcccctgatgacagatcctacaagtcccagtacctgaacaatggtccccagagaattgggagaaagtacaagaaagtcagattcatggcctacactgatgaaaccttcaagactagagaagccatccagcatgagtcaggcattctgggtcccctgctgtatggggaagttggtgacaccctgctgatcatcttcaagaaccaagccagcaggccttacaacatctacccccatggaattacagatgtcaggccactgtactccaggagactgcctaagggagtcaagcacctcaaggacttccccatcctgcctggagaaatcttcaagtacaagtggactgtgactgtggaggatgggcctaccaagtcagaccctagatgcctgactaggtactactccagctttgtcaacatggagagagacttggcctcaggactcattggtccactgcttatttgctacaaggagtcagtggaccagagaggaaaccaaatcatgtctgacaagagaaatgtcatcctgttctcagtctttgatgagaacaggtcctggtacctgactgaaaacatccagagattcctgcccaaccctgctggggtgcaactggaggaccctgagttccaggcctcaaacataatgcacagcatcaatggctatgtctttgactccctgcaactgtcagtgtgcttgcatgaagtggcctactggtacatcctctccattggggcccagactgacttcctgtcagtgtttttctctggctacaccttcaagcataaaatggtgtatgaggacaccctcaccctgttccccttctctggagagactgtgttcatgagcatggaaaacccaggcctctggatccttggctgtcacaactcagacttcagaaacaggggcatgactgccctgcttaaggtgtccagctgtgacaagaacactggggactactatgaggactcctatgaggacatcagtgcctaccttctgtccaagaacaatgccattgaacctaggagcttcagccagaactccaggcacccaagcaccaggcagaagcagttcaatgccaccaccatccctgagaacactaccctgcaatcagaccaagaagaaattgactatgatgacaccatctcagtggagatgaagaaggaggactttgacatctatgatgaagatgaaaaccaaagccccagatccttccagaaaaagaccaggcactacttcattgcagcagtggagagattatgggactatgggatgtccagctcccctcatgtgctgagaaacagagcacagtctggctcagtgccccagttcaagaaggtggtgttccaggagttcactgatggttccttcacccaaccattgtacaggggagagctgaatgagcacctgggcctgttgggcccatacatcagagcagaagtggaggacaacatcatggtcaccttcagaaaccaggcctccagaccctactccttctactcctccctgatctcctatgaagaggaccaaagacagggagctgagcccagaaagaactttgtgaagccaaatgaaaccaagacctacttctggaaagtgcagcaccacatggcccccaccaaggatgagtttgactgcaaagcttgggcctacttcagtgatgtggacttggagaaggatgtgcactcaggtcttattggccctctgcttgtgtgccataccaacactcttaaccctgcacatggcagacaagtcactgtgcaggagtttgccctcttcttcaccatctttgatgaaacaaagtcctggtacttcacagaaaacatggaaaggaactgcagagccccttgcaacatccagatggaggaccccaccttcaaggaaaactacaggtttcatgccatcaatgggtacatcatggacaccctgcctggactggtcatggcccaggaccagaggatcagatggtatctgctcagcatgggaagcaatgagaacatccactccattcacttcagtggtcatgtgttcactgtcaggaaaaaggaggagtacaagatggccctctacaacctttaccctggagtgtttgaaactgtggaaatgctgccatccaaggctggcatctggagggtggaatgcctcattggtgaacacctccatgctggaatgtccaccctcttcctggtgtacagcaacaagtgccagacccccctgggaatggcttcagggcacatcagagacttccagatcactgcctctgggcagtatggacagtgggcccctaagctggccaggctccactactctggaagcatcaatgcctggtccactaaggagcccttctcctggatcaaagtggatctgctggcccccatgatcatccatggcattaagacccagggggccagacagaagttctcctccctctacataagccagttcattatcatgtacagcctggatgggaagaagtggcagacctacaggggcaactccactggaaccctgatggtgttctttgggaatgtggacagctcaggcatcaagcacaacatcttcaaccccccaatcattgccagatacatcaggctccaccccacccactacagcatcagatccaccctgagaatggaacttatgggctgtgacctcaactcctgtagcatgcccctgggcatggagtccaaggccatttcagatgcccaaatcactgcatcctcctacttcaccaacatgtttgccacttggagcccttccaaggccagactgcatctgcaaggcagatccaatgcctggaggccccaggtcaacaaccctaaggaatggctccaggtggacttccaaaagactatgaaagtcactggagtgaccacccagggagtgaagtccctgctgacctctatgtatgtgaaggaattcctcatctcctcaagccaagatggacaccagtggaccctgttcttccaaaatggaaaggtcaaagtgttccagggcaaccaggacagcttcacccctgtggtgaactccttggacccccccctgttgaccagatacctgaggatccacccccagtcctgggtccaccagattgccttgagaatggaggtgctgggctgtgaagcccaggacctctactaattaattaagagcatcttaccgccatttattcccatatttgttctgtttttcttgatttgggtatacatttaaatgttaataaaacaaaatggtggggcaatcatttacatttttagggatatgtaattactagttcaggtgtattgccacaagacaaacatgttaagaaactttcccgttatttacgctctgttcctgttaatcaacctctggattacaaaatttgtgaaagattgactgatattcttaactatgttgctccttttacgctgtgtggatatgctgctttatagcctctgtatctagctattgcttcccgtacggctttcgttttctcctccttgtataaatcctggttgctgtctcttttagaggagttgtggcccgttgtccgtcaacgtggcgtggtgtgctctgtgtttgctgacgcaacccccactggctggggcattgccaccacctgtcaactcctttctgggactttcgctttccccctcccgatcgccacggcagaactcatcgccgcctgccttgcccgctgctggacaggggctaggttgctgggcactgataattccgtggtgttgtctgtgccttctagttgccagccatctgttgtttgcccctcccccgtgccttccttgaccctggaaggtgccactcccactgtcctttcctaataaaatgaggaaattgcatcgcattgtctgagtaggtgtcattctattctggggggtggggtggggcaggacagcaagggggaggattgggaagacaatagcaggcatgctggggatgcggtgggctctatggctctagagcatggctacgtagataagtagcatggcgggttaatcattaactacacctgcaggaggaacccctagtgatggagttggccactccctctctgcgcgctcgctcgctcactgaggccgggcgaccaaaggtcgcccgacgcccgggcggcctcagtgagcgagcgagcgcgcagctgcctgcagg

SEQ ID NO: 450 - DNA, 6598 bp, Artificial Sequence
  Description of Artificial Sequence: Synthetic polynucleotide
cctgcaggcagctgcgcgctcgctcgctcactgaggccgcccgggcaaagcccgggcgtcgggcgacctttggtcgcccggcctcagtgagcgagcgagcgcgcagagagggagtggccaactccatcactaggggttccttgtagttaatgattaacccgccatgctacttatcgcggccgcaggctcagaggcacacaggagtttctgggctcaccctgcccccttccaacccctcagttcccatcctccagcagctgtttgtgtgctgcctctgaagtccacactgaacaaacttcagcctactcatgtccctaaaatgggcaaacattgcaagcagcaaacagcaaacacacagccctccctgcctgctgaccttggagctggggcagaggtcagagacctctctgggcccatgccacctccaacatccactcgaccccttggaatttcggtggagaggagcagaggttgtcctggcgtggtttaggtagtgtgagagggcttaagagcaacagatcattctatgggttaatcattaacaacaggttaggcttgtactttggtacattggctcctagttaatcattaacttagcaatgtgcttgtactttggtacatagttacctagttaatcattaacaaacagtatggcttgtactttggtacaagcaacagatcattctatgggcgagaacttgtgcctccccgtgttcctgctctttgtccctctgtcctacttagactaatatttgccttgggtactgcaaacaggaaatgggggagggacaggagtagggcggagggtagcaattggattctgcagtgagagcagagggccagctaagtggtactctcccagagactgtctgactcacgccaccccctccaccttggacacaggacgctgtggtttctgagccaggtacaatgactcctttcggtaagtgcagtggaagctgtacactgcccaggcaaagcgtccgggcagcgtaggcgggcgactcagatcccagccagtggacttagcccctgtttgctcctccgataactggggtgaccttggttaatattcaccagcagcctcccccgttgcccctctggatccactgcttaaatacggacgaggacagggccctgtctcctcagcttcaggcaccaccactgacctgggacagtgaatgtttaaaccgcagccaccatgcagattgaactctccacctgtttcttcctgtgcctgctgagattctgcttcagtgccaccaggaggtactacttgggtgcagtggagctctcctgggactacatgcagtcagacctgggagagctccctgtggatgccaggttccctccaagggtccctaaatccttccccttcaacacctcagtggtgtacaagaaaaccctgtttgtggaattcactgaccacctgttcaacattgccaagcccaggccaccctggatggggctcctgggcccaaccatccaagctgaagtgtatgacactgtggtcatcaccctcaagaacatggcctcccaccctgtctccctgcatgctgtgggagtgtcctactggaaggcctcagagggggctgagtatgatgaccagacctcccagagggaaaaggaagatgacaaggtgttcccaggaggatcccacacctatgtgtggcaagtcctgaaggaaaatggtcccatggcatcagaccccttgtgcttgacctactcctacctgagccatgtggacctggtcaaggacctgaactcaggccttattggagccctgcttgtatgcagagagggcagcctggccaaggaaaagacccagaccctgcacaagttcatcctcctgtttgctgtgtttgatgaaggaaagtcctggcactcagagactaagaacagcctgatgcaggacagggatgcagcatcagccagagcctggcccaagatgcacactgtgaatggatatgtgaacaggtccctccctggactaattggatgccacagaaagtctgtgtactggcatgtcattggaatgggcacaacccctgaagtgcatagcatcttcctggaaggacacaccttcctggtcaggaaccacagacaggcatccctggagatctccccaatcaccttcctgactgcccagactctcctgatggacctgggacagttcttgcttttctgccacatctcctcccaccaacatgatggcatggaagcctatgtgaaggtggactcctgccctgaggaacctcaactgaggatgaaaaacaatgaagaagctgaagattatgatgatgacctgactgactcagagatggatgttgtcagatttgatgatgacaacagccctagcttcatccagattagatctgtggccaagaagcaccccaagacctgggtgcactacattgctgctgaggaagaggactgggactatgcccccctggtgctggcccctgatgacagatcctacaagtcccagtacctgaacaatggtccccagagaattgggagaaagtacaagaaagtcagattcatggcctacactgatgaaaccttcaagactagagaagccatccagcatgagtcaggcattctgggtcccctgctgtatggggaagttggtgacaccctgctgatcatcttcaagaaccaagccagcaggccttacaacatctacccccatggaattacagatgtcaggccactgtactccaggagactgcctaagggagtcaagcacctcaaggacttccccatcctgcctggagaaatcttcaagtacaagtggactgtgactgtggaggatgggcctaccaagtcagaccctagatgcctgactaggtactactccagctttgtcaacatggagagagacttggcctcaggactcattggtccactgcttatttgctacaaggagtcagtggaccagagaggaaaccaaatcatgtctgacaagagaaatgtcatcctgttctcagtctttgatgagaacaggtcctggtacctgactgaaaacatccagagattcctgcccaaccctgctggggtgcaactggaggaccctgagttccaggcctcaaacataatgcacagcatcaatggctatgtctttgactccctgcaactgtcagtgtgcttgcatgaagtggcctactggtacatcctctccattggggcccagactgacttcctgtcagtgtttttctctggctacaccttcaagcataaaatggtgtatgaggacaccctcaccctgttccccttctctggagagactgtgttcatgagcatggaaaacccaggcctctggatccttggctgtcacaactcagacttcagaaacaggggcatgactgccctgcttaaggtgtccagctgtgacaagaacactggggactactatgaggactcctatgaggacatcagtgcctaccttctgtccaagaacaatgccattgaacctaggagcttcagccagaactccaggcacccaagcaccaggcagaagcagttcaatgccaccaccatccctgagaacactaccctgcaatcagaccaagaagaaattgactatgatgacaccatctcagtggagatgaagaaggaggactttgacatctatgatgaagatgaaaaccaaagccccagatccttccagaaaaagaccaggcactacttcattgcagcagtggagagattatgggactatgggatgtccagctcccctcatgtgctgagaaacagagcacagtctggctcagtgccccagttcaagaaggtggtgttccaggagttcactgatggttccttcacccaaccattgtacaggggagagctgaatgagcacctgggcctgttgggcccatacatcagagcagaagtggaggacaacatcatggtcaccttcagaaaccaggcctccagaccctactccttctactcctccctgatctcctatgaagaggaccaaagacagggagctgagcccagaaagaactttgtgaagccaaatgaaaccaagacctacttctggaaagtgcagcaccacatggcccccaccaaggatgagtttgactgcaaagcttgggcctacttcagtgatgtggacttggagaaggatgtgcactcaggtcttattggccctctgcttgtgtgccataccaacactcttaaccctgcacatggcagacaagtcactgtgcaggagtttgccctcttcttcaccatctttgatgaaacaaagtcctggtacttcacagaaaacatggaaaggaactgcagagccccttgcaacatccagatggaggaccccaccttcaaggaaaactacaggtttcatgccatcaatgggtacatcatggacaccctgcctggactggtcatggcccaggaccagaggatcagatggtatctgctcagcatgggaagcaatgagaacatccactccattcacttcagtggtcatgtgttcactgtcaggaaaaaggaggagtacaagatggccctctacaacctttaccctggagtgtttgaaactgtggaaatgctgccatccaaggctggcatctggagggtggaatgcctcattggtgaacacctccatgctggaatgtccaccctcttcctggtgtacagcaacaagtgccagacccccctgggaatggcttcagggcacatcagagacttccagatcactgcctctgggcagtatggacagtgggcccctaagctggccaggctccactactctggaagcatcaatgcctggtccactaaggagcccttctcctggatcaaagtggatctgctggcccccatgatcatccatggcattaagacccagggggccagacagaagttctcctccctctacataagccagttcattatcatgtacagcctggatgggaagaagtggcagacctacaggggcaactccactggaaccctgatggtgttctttgggaatgtggacagctcaggcatcaagcacaacatcttcaaccccccaatcattgccagatacatcaggctccaccccacccactacagcatcagatccaccctgagaatggaacttatgggctgtgacctcaactcctgtagcatgcccctgggcatggagtccaaggccatttcagatgcccaaatcactgcatcctcctacttcaccaacatgtttgccacttggagcccttccaaggccagactgcatctgcaaggcagatccaatgcctggaggccccaggtcaacaaccctaaggaatggctccaggtggacttccaaaagactatgaaagtcactggagtgaccacccagggagtgaagtccctgctgacctctatgtatgtgaaggaattcctcatctcctcaagccaagatggacaccagtggaccctgttcttccaaaatggaaaggtcaaagtgttccagggcaaccaggacagcttcacccctgtggtgaactccttggacccccccctgttgaccagatacctgaggatccacccccagtcctgggtccaccagattgccttgagaatggaggtgctgggctgtgaagcccaggacctctactaattaattaagagcatcttaccgccatttattcccatatttgttctgtttttcttgatttgggtatacatttaaatgttaataaaacaaaatggtggggcaatcatttacatttttagggatatgtaattactagttcaggtgtattgccacaagacaaacatgttaagaaactttcccgttatttacgctctgttcctgttaatcaacctctggattacaaaatttgtgaaagattgactgatattcttaactatgttgctccttttacgctgtgtggatatgctgctttatagcctctgtatctagctattgcttcccgtacggctttcgttttctcctccttgtataaatcctggttgctgtctcttttagaggagttgtggcccgttgtccgtcaacgtggcgtggtgtgctctgtgtttgctgacgcaacccccactggctggggcattgccaccacctgtcaactcctttctgggactttcgctttccccctcccgatcgccacggcagaactcatcgccgcctgccttgcccgctgctggacaggggctaggttgctgggcactgataattccgtggtgttgtctgtgccttctagttgccagccatctgttgtttgcccctcccccgtgccttccttgaccctggaaggtgccactcccactgtcctttcctaataaaatgaggaaattgcatcgcattgtctgagtaggtgtcattctattctggggggtggggtggggcaggacagcaagggggaggattgggaagacaatagcaggcatgctggggatgcggtgggctctatggctctagagcatggctacgtagataagtagcatggcgggttaatcattaactacacctgcaggaggaacccctagtgatggagttggccactccctctctgcgcgctcgctcgctcactgaggccgggcgaccaaaggtcgcccgacgcccgggcggcctcagtgagcgagcgagcgcgcagctgcctgcagg

SEQ ID NO: 451 - DNA, 6182 bp, Artificial Sequence
  Description of Artificial Sequence: Synthetic polynucleotide
cctgcaggcagctgcgcgctcgctcgctcactgaggccgcccgggcaaagcccgggcgtcgggcgacctttggtcgcccggcctcagtgagcgagcgagcgcgcagagagggagtggccaactccatcactaggggttccttgtagttaatgattaacccgccatgctacttatcgcggccgcaacaggttagtttgactagcgttaatcattaacgttaatcattaacgttaatcattaacgttaatcattaacgttaatcattaacatcgatgcgagaacttgtgcctccccgtgttcctgctctttgtccctctgtcctacttagactaatatttgccttgggtactgcaaacaggaaatgggggagggacaggagtagggcggagggtagcccggggattctgcagtgagagcagagggccagctaagtggtactctcccagagactgtctgactcacgccaccccctccaccttggacacaggacgctgtggtttctgagccaggtacaatgactcctttcggtaagtgcagtggaagctgtacactgcccaggcaaagcgtccgggcagcgtaggcgggcgactcagatcccagccagtggacttagcccctgtttgctcctccgataactggggtgaccttggttaatattcaccagcagcctcccccgttgcccctctggatccactgcttaaatacggacgaggacagggccctgtctcctcagcttcaggcaccaccactgacctgggacagtgaatgtttaaaccgcagccaccatgcagattgaactctccacctgtttcttcctgtgcctgctgagattctgcttcagtgccaccaggaggtactacttgggtgcagtggagctctcctgggactacatgcagtcagacctgggagagctccctgtggatgccaggttccctccaagggtccctaaatccttccccttcaacacctcagtggtgtacaagaaaaccctgtttgtggaattcactgaccacctgttcaacattgccaagcccaggccaccctggatggggctcctgggcccaaccatccaagctgaagtgtatgacactgtggtcatcaccctcaagaacatggcctcccaccctgtctccctgcatgctgtgggagtgtcctactggaaggcctcagagggggctgagtatgatgaccagacctcccagagggaaaaggaagatgacaaggtgttcccaggaggatcccacacctatgtgtggcaagtcctgaaggaaaatggtcccatggcatcagaccccttgtgcttgacctactcctacctgagccatgtggacctggtcaaggacctgaactcaggccttattggagccctgcttgtatgcagagagggcagcctggccaaggaaaagacccagaccctgcacaagttcatcctcctgtttgctgtgtttgatgaaggaaagtcctggcactcagagactaagaacagcctgatgcaggacagggatgcagcatcagccagagcctggcccaagatgcacactgtgaatggatatgtgaacaggtccctccctggactaattggatgccacagaaagtctgtgtactggcatgtcattggaatgggcacaacccctgaagtgcatagcatcttcctggaaggacacaccttcctggtcaggaaccacagacaggcatccctggagatctccccaatcaccttcctgactgcccagactctcctgatggacctgggacagttcttgcttttctgccacatctcctcccaccaacatgatggcatggaagcctatgtgaaggtggactcctgccctgaggaacctcaactgaggatgaaaaacaatgaagaagctgaagattatgatgatgacctgactgactcagagatggatgttgtcagatttgatgatgacaacagccctagcttcatccagattagatctgtggccaagaagcaccccaagacctgggtgcactacattgctgctgaggaagaggactgggactatgcccccctggtgctggcccctgatgacagatcctacaagtcccagtacctgaacaatggtccccagagaattgggagaaagtacaagaaagtcagattcatggcctacactgatgaaaccttcaagactagagaagccatccagcatgagtcaggcattctgggtcccctgctgtatggggaagttggtgacaccctgctgatcatcttcaagaaccaagccagcaggccttacaacatctacccccatggaattacagatgtcaggccactgtactccaggagactgcctaagggagtcaagcacctcaaggacttccccatcctgcctggagaaatcttcaagtacaagtggactgtgactgtggaggatgggcctaccaagtcagaccctagatgcctgactaggtactactccagctttgtcaacatggagagagacttggcctcaggactcattggtccactgcttatttgctacaaggagtcagtggaccagagaggaaaccaaatcatgtctgacaagagaaatgtcatcctgttctcagtctttgatgagaacaggtcctggtacctgactgaaaacatccagagattcctgcccaaccctgctggggtgcaactggaggaccctgagttccaggcctcaaacataatgcacagcatcaatggctatgtctttgactccctgcaactgtcagtgtgcttgcatgaagtggcctactggtacatcctctccattggggcccagactgacttcctgtcagtgtttttctctggctacaccttcaagcataaaatggtgtatgaggacaccctcaccctgttccccttctctggagagactgtgttcatgagcatggaaaacccaggcctctggatccttggctgtcacaactcagacttcagaaacaggggcatgactgccctgcttaaggtgtccagctgtgacaagaacactggggactactatgaggactcctatgaggacatcagtgcctaccttctgtccaagaacaatgccattgaacctaggagcttcagccagaactccaggcacccaagcaccaggcagaagcagttcaatgccaccaccatccctgagaacactaccctgcaatcagaccaagaagaaattgactatgatgacaccatctcagtggagatgaagaaggaggactttgacatctatgatgaagatgaaaaccaaagccccagatccttccagaaaaagaccaggcactacttcattgcagcagtggagagattatgggactatgggatgtccagctcccctcatgtgctgagaaacagagcacagtctggctcagtgccccagttcaagaaggtggtgttccaggagttcactgatggttccttcacccaaccattgtacaggggagagctgaatgagcacctgggcctgttgggcccatacatcagagcagaagtggaggacaacatcatggtcaccttcagaaaccaggcctccagaccctactccttctactcctccctgatctcctatgaagaggaccaaagacagggagctgagcccagaaagaactttgtgaagccaaatgaaaccaagacctacttctggaaagtgcagcaccacatggcccccaccaaggatgagtttgactgcaaagcttgggcctacttcagtgatgtggacttggagaaggatgtgcactcaggtcttattggccctctgcttgtgtgccataccaacactcttaaccctgcacatggcagacaagtcactgtgcaggagtttgccctcttcttcaccatctttgatgaaacaaagtcctggtacttcacagaaaacatggaaaggaactgcagagccccttgcaacatccagatggaggaccccaccttcaaggaaaactacaggtttcatgccatcaatgggtacatcatggacaccctgcctggactggtcatggcccaggaccagaggatcagatggtatctgctcagcatgggaagcaatgagaacatccactccattcacttcagtggtcatgtgttcactgtcaggaaaaaggaggagtacaagatggccctctacaacctttaccctggagtgtttgaaactgtggaaatgctgccatccaaggctggcatctggagggtggaatgcctcattggtgaacacctccatgctggaatgtccaccctcttcctggtgtacagcaacaagtgccagacccccctgggaatggcttcagggcacatcagagacttccagatcactgcctctgggcagtatggacagtgggcccctaagctggccaggctccactactctggaagcatcaatgcctggtccactaaggagcccttctcctggatcaaagtggatctgctggcccccatgatcatccatggcattaagacccagggggccagacagaagttctcctccctctacataagccagttcattatcatgtacagcctggatgggaagaagtggcagacctacaggggcaactccactggaaccctgatggtgttctttgggaatgtggacagctcaggcatcaagcacaacatcttcaaccccccaatcattgccagatacatcaggctccaccccacccactacagcatcagatccaccctgagaatggaacttatgggctgtgacctcaactcctgtagcatgcccctgggcatggagtccaaggccatttcagatgcccaaatcactgcatcctcctacttcaccaacatgtttgccacttggagcccttccaaggccagactgcatctgcaaggcagatccaatgcctggaggccccaggtcaacaaccctaaggaatggctccaggtggacttccaaaagactatgaaagtcactggagtgaccacccagggagtgaagtccctgctgacctctatgtatgtgaaggaattcctcatctcctcaagccaagatggacaccagtggaccctgttcttccaaaatggaaaggtcaaagtgttccagggcaaccaggacagcttcacccctgtggtgaactccttggacccccccctgttgaccagatacctgaggatccacccccagtcctgggtccaccagattgccttgagaatggaggtgctgggctgtgaagcccaggacctctactaattaattaagagcatcttaccgccatttattcccatatttgttctgtttttcttgatttgggtatacatttaaatgttaataaaacaaaatggtggggcaatcatttacatttttagggatatgtaattactagttcaggtgtattgccacaagacaaacatgttaagaaactttcccgttatttacgctctgttcctgttaatcaacctctggattacaaaatttgtgaaagattgactgatattcttaactatgttgctccttttacgctgtgtggatatgctgctttatagcctctgtatctagctattgcttcccgtacggctttcgttttctcctccttgtataaatcctggttgctgtctcttttagaggagttgtggcccgttgtccgtcaacgtggcgtggtgtgctctgtgtttgctgacgcaacccccactggctggggcattgccaccacctgtcaactcctttctgggactttcgctttccccctcccgatcgccacggcagaactcatcgccgcctgccttgcccgctgctggacaggggctaggttgctgggcactgataattccgtggtgttgtctgtgccttctagttgccagccatctgttgtttgcccctcccccgtgccttccttgaccctggaaggtgccactcccactgtcctttcctaataaaatgaggaaattgcatcgcattgtctgagtaggtgtcattctattctggggggtggggtggggcaggacagcaagggggaggattgggaagacaatagcaggcatgctggggatgcggtgggctctatggctctagagcatggctacgtagataagtagcatggcgggttaatcattaactacacctgcaggaggaacccctagtgatggagttggccactccctctctgcgcgctcgctcgctcactgaggccgggcgaccaaaggtcgcccgacgcccgggcggcctcagtgagcgagcgagcgcgcagctgcctgcagg

SEQ ID NO: 452 - DNA, 6226 bp, Artificial Sequence
  Description of Artificial Sequence: Synthetic polynucleotide
cctgcaggcagctgcgcgctcgctcgctcactgaggccgcccgggcaaagcccgggcgtcgggcgacctttggtcgcccggcctcagtgagcgagcgagcgcgcagagagggagtggccaactccatcactaggggttccttgtagttaatgattaacccgccatgctacttatcgcggccgcagcaacagatcattctatgggttaatcattaacaacaggttaggttaatcattaacttggctcctagttaatcattaacaaacagtatggttaatcattaacaaattctggggttaatcattaactagttacctagcgagaacttgtgcctccccgtgttcctgctctttgtccctctgtcctacttagactaatatttgccttgggtactgcaaacaggaaatgggggagggacaggagtagggcggagggtagcaattggattctgcagtgagagcagagggccagctaagtggtactctcccagagactgtctgactcacgccaccccctccaccttggacacaggacgctgtggtttctgagccaggtacaatgactcctttcggtaagtgcagtggaagctgtacactgcccaggcaaagcgtccgggcagcgtaggcgggcgactcagatcccagccagtggacttagcccctgtttgctcctccgataactggggtgaccttggttaatattcaccagcagcctcccccgttgcccctctggatccactgcttaaatacggacgaggacagggccctgtctcctcagcttcaggcaccaccactgacctgggacagtgaatgtttaaaccgcagccaccatgcagattgaactctccacctgtttcttcctgtgcctgctgagattctgcttcagtgccaccaggaggtactacttgggtgcagtggagctctcctgggactacatgcagtcagacctgggagagctccctgtggatgccaggttccctccaagggtccctaaatccttccccttcaacacctcagtggtgtacaagaaaaccctgtttgtggaattcactgaccacctgttcaacattgccaagcccaggccaccctggatggggctcctgggcccaaccatccaagctgaagtgtatgacactgtggtcatcaccctcaagaacatggcctcccaccctgtctccctgcatgctgtgggagtgtcctactggaaggcctcagagggggctgagtatgatgaccagacctcccagagggaaaaggaagatgacaaggtgttcccaggaggatcccacacctatgtgtggcaagtcctgaaggaaaatggtcccatggcatcagaccccttgtgcttgacctactcctacctgagccatgtggacctggtcaaggacctgaactcaggccttattggagccctgcttgtatgcagagagggcagcctggccaaggaaaagacccagaccctgcacaagttcatcctcctgtttgctgtgtttgatgaaggaaagtcctggcactcagagactaagaacagcctgatgcaggacagggatgcagcatcagccagagcctggcccaagatgcacactgtgaatggatatgtgaacaggtccctccctggactaattggatgccacagaaagtctgtgtactggcatgtcattggaatgggcacaacccctgaagtgcatagcatcttcctggaaggacacaccttcctggtcaggaaccacagacaggcatccctggagatctccccaatcaccttcctgactgcccagactctcctgatggacctgggacagttcttgcttttctgccacatctcctcccaccaacatgatggcatggaagcctatgtgaaggtggactcctgccctgaggaacctcaactgaggatgaaaaacaatgaagaagctgaagattatgatgatgacctgactgactcagagatggatgttgtcagatttgatgatgacaacagccctagcttcatccagattagatctgtggccaagaagcaccccaagacctgggtgcactacattgctgctgaggaagaggactgggactatgcccccctggtgctggcccctgatgacagatcctacaagtcccagtacctgaacaatggtccccagagaattgggagaaagtacaagaaagtcagattcatggcctacactgatgaaaccttcaagactagagaagccatccagcatgagtcaggcattctgggtcccctgctgtatggggaagttggtgacaccctgctgatcatcttcaagaaccaagccagcaggccttacaacatctacccccatggaattacagatgtcaggccactgtactccaggagactgcctaagggagtcaagcacctcaaggacttccccatcctgcctggagaaatcttcaagtacaagtggactgtgactgtggaggatgggcctaccaagtcagaccctagatgcctgactaggtactactccagctttgtcaacatggagagagacttggcctcaggactcattggtccactgcttatttgctacaaggagtcagtggaccagagaggaaaccaaatcatgtctgacaagagaaatgtcatcctgttctcagtctttgatgagaacaggtcctggtacctgactgaaaacatccagagattcctgcccaaccctgctggggtgcaactggaggaccctgagttccaggcctcaaacataatgcacagcatcaatggctatgtctttgactccctgcaactgtcagtgtgcttgcatgaagtggcctactggtacatcctctccattggggcccagactgacttcctgtcagtgtttttctctggctacaccttcaagcataaaatggtgtatgaggacaccctcaccctgttccccttctctggagagactgtgttcatgagcatggaaaacccaggcctctggatccttggctgtcacaactcagacttcagaaacaggggcatgactgccctgcttaaggtgtccagctgtgacaagaacactggggactactatgaggactcctatgaggacatcagtgcctaccttctgtccaagaacaatgccattgaacctaggagcttcagccagaactccaggcacccaagcaccaggcagaagcagttcaatgccaccaccatccctgagaacactaccctgcaatcagaccaagaagaaattgactatgatgacaccatctcagtggagatgaagaaggaggactttgacatctatgatgaagatgaaaaccaaagccccagatccttccagaaaaagaccaggcactacttcattgcagcagtggagagattatgggactatgggatgtccagctcccctcatgtgctgagaaacagagcacagtctggctcagtgccccagttcaagaaggtggtgttccaggagttcactgatggttccttcacccaaccattgtacaggggagagctgaatgagcacctgggcctgttgggcccatacatcagagcagaagtggaggacaacatcatggtcaccttcagaaaccaggcctccagaccctactccttctactcctccctgatctcctatgaagaggaccaaagacagggagctgagcccagaaagaactttgtgaagccaaatgaaaccaagacctacttctggaaagtgcagcaccacatggcccccaccaaggatgagtttgactgcaaagcttgggcctacttcagtgatgtggacttggagaaggatgtgcactcaggtcttattggccctctgcttgtgtgccataccaacactcttaaccctgcacatggcagacaagtcactgtgcaggagtttgccctcttcttcaccatctttgatgaaacaaagtcctggtacttcacagaaaacatggaaaggaactgcagagccccttgcaacatccagatggaggaccccaccttcaaggaaaactacaggtttcatgccatcaatgggtacatcatggacaccctgcctggactggtcatggcccaggaccagaggatcagatggtatctgctcagcatgggaagcaatgagaacatccactccattcacttcagtggtcatgtgttcactgtcaggaaaaaggaggagtacaagatggccctctacaacctttaccctggagtgtttgaaactgtggaaatgctgccatccaaggctggcatctggagggtggaatgcctcattggtgaacacctccatgctggaatgtccaccctcttcctggtgtacagcaacaagtgccagacccccctgggaatggcttcagggcacatcagagacttccagatcactgcctctgggcagtatggacagtgggcccctaagctggccaggctccactactctggaagcatcaatgcctggtccactaaggagcccttctcctggatcaaagtggatctgctggcccccatgatcatccatggcattaagacccagggggccagacagaagttctcctccctctacataagccagttcattatcatgtacagcctggatgggaagaagtggcagacctacaggggcaactccactggaaccctgatggtgttctttgggaatgtggacagctcaggcatcaagcacaacatcttcaaccccccaatcattgccagatacatcaggctccaccccacccactacagcatcagatccaccctgagaatggaacttatgggctgtgacctcaactcctgtagcatgcccctgggcatggagtccaaggccatttcagatgcccaaatcactgcatcctcctacttcaccaacatgtttgccacttggagcccttccaaggccagactgcatctgcaaggcagatccaatgcctggaggccccaggtcaacaaccctaaggaatggctccaggtggacttccaaaagactatgaaagtcactggagtgaccacccagggagtgaagtccctgctgacctctatgtatgtgaaggaattcctcatctcctcaagccaagatggacaccagtggaccctgttcttccaaaatggaaaggtcaaagtgttccagggcaaccaggacagcttcacccctgtggtgaactccttggacccccccctgttgaccagatacctgaggatccacccccagtcctgggtccaccagattgccttgagaatggaggtgctgggctgtgaagcccaggacctctactaattaattaagagcatcttaccgccatttattcccatatttgttctgtttttcttgatttgggtatacatttaaatgttaataaaacaaaatggtggggcaatcatttacatttttagggatatgtaattactagttcaggtgtattgccacaagacaaacatgttaagaaactttcccgttatttacgctctgttcctgttaatcaacctctggattacaaaatttgtgaaagattgactgatattcttaactatgttgctccttttacgctgtgtggatatgctgctttatagcctctgtatctagctattgcttcccgtacggctttcgttttctcctccttgtataaatcctggttgctgtctcttttagaggagttgtggcccgttgtccgtcaacgtggcgtggtgtgctctgtgtttgctgacgcaacccccactggctggggcattgccaccacctgtcaactcctttctgggactttcgctttccccctcccgatcgccacggcagaactcatcgccgcctgccttgcccgctgctggacaggggctaggttgctgggcactgataattccgtggtgttgtctgtgccttctagttgccagccatctgttgtttgcccctcccccgtgccttccttgaccctggaaggtgccactcccactgtcctttcctaataaaatgaggaaattgcatcgcattgtctgagtaggtgtcattctattctggggggtggggtggggcaggacagcaagggggaggattgggaagacaatagcaggcatgctggggatgcggtgggctctatggctctagagcatggctacgtagataagtagcatggcgggttaatcattaactacacctgcaggaggaacccctagtgatggagttggccactccctctctgcgcgctcgctcgctcactgaggccgggcgaccaaaggtcgcccgacgcccgggcggcctcagtgagcgagcgagcgcgcagctgcctgcagg

SEQ ID NO: 453 - DNA, 6412 bp, Artificial Sequence
  Description of Artificial Sequence: Synthetic polynucleotide
tgtagttaatgattaacccgccatgctacttatcgcggccgcaggctcagaggcacacaggagtttctgggctcaccctgcccccttccaacccctcagttcccatcctccagcagctgtttgtgtgctgcctctgaagtccacactgaacaaacttcagcctactcatgtccctaaaatgggcaaacattgcaagcagcaaacagcaaacacacagccctccctgcctgctgaccttggagctggggcagaggtcagagacctctctgggcccatgccacctccaacatccactcgaccccttggaatttcggtggagaggagcagaggttgtcctggcgtggtttaggtagtgtgagagggcttaagagcaacagatcattctatgggttaatcattaacaacaggttaggttaatcattaacttggctcctagttaatcattaacaaacagtatggttaatcattaacaaattctggggttaatcattaactagttacctagcgagaacttgtgcctccccgtgttcctgctctttgtccctctgtcctacttagactaatatttgccttgggtactgcaaacaggaaatgggggagggacaggagtagggcggagggtagcaattggattctgcagtgagagcagagggccagctaagtggtactctcccagagactgtctgactcacgccaccccctccaccttggacacaggacgctgtggtttctgagccaggtacaatgactcctttcggtaagtgcagtggaagctgtacactgcccaggcaaagcgtccgggcagcgtaggcgggcgactcagatcccagccagtggacttagcccctgtttgctcctccgataactggggtgaccttggttaatattcaccagcagcctcccccgttgcccctctggatccactgcttaaatacggacgaggacagggccctgtctcctcagcttcaggcaccaccactgacctgggacagtgaatgtttaaaccgcagccaccatgcagattgaactctccacctgtttcttcctgtgcctgctgagattctgcttcagtgccaccaggaggtactacttgggtgcagtggagctctcctgggactacatgcagtcagacctgggagagctccctgtggatgccaggttccctccaagggtccctaaatccttccccttcaacacctcagtggtgtacaagaaaaccctgtttgtggaattcactgaccacctgttcaacattgccaagcccaggccaccctggatggggctcctgggcccaaccatccaagctgaagtgtatgacactgtggtcatcaccctcaagaacatggcctcccaccctgtctccctgcatgctgtgggagtgtcctactggaaggcctcagagggggctgagtatgatgaccagacctcccagagggaaaaggaagatgacaaggtgttcccaggaggatcccacacctatgtgtggcaagtcctgaaggaaaatggtcccatggcatcagaccccttgtgcttgacctactcctacctgagccatgtggacctggtcaaggacctgaactcaggccttattggagccctgcttgtatgcagagagggcagcctggccaaggaaaagacccagaccctgcacaagttcatcctcctgtttgctgtgtttgatgaaggaaagtcctggcactcagagactaagaacagcctgatgcaggacagggatgcagcatcagccagagcctggcccaagatgcacactgtgaatggatatgtgaacaggtccctccctggactaattggatgccacagaaagtctgtgtactggcatgtcattggaatgggcacaacccctgaagtgcatagcatcttcctggaaggacacaccttcctggtcaggaaccacagacaggcatccctggagatctccccaatcaccttcctgactgcccagactctcctgatggacctgggacagttcttgcttttctgccacatctcctcccaccaacatgatggcatggaagcctatgtgaaggtggactcctgccctgaggaacctcaactgaggatgaaaaacaatgaagaagctgaagattatgatgatgacctgactgactcagagatggatgttgtcagatttgatgatgacaacagccctagcttcatccagattagatctgtggccaagaagcaccccaagacctgggtgcactacattgctgctgaggaagaggactgggactatgcccccctggtgctggcccctgatgacagatcctacaagtcccagtacctgaacaatggtccccagagaattgggagaaagtacaagaaagtcagattcatggcctacactgatgaaaccttcaagactagagaagccatccagcatgagtcaggcattctgggtcccctgctgtatggggaagttggtgacaccctgctgatcatcttcaagaaccaagccagcaggccttacaacatctacccccatggaattacagatgtcaggccactgtactccaggagactgcctaagggagtcaagcacctcaaggacttccccatcctgcctggagaaatcttcaagtacaagtggactgtgactgtggaggatgggcctaccaagtcagaccctagatgcctgactaggtactactccagctttgtcaacatggagagagacttggcctcaggactcattggtccactgcttatttgctacaaggagtcagtggaccagagaggaaaccaaatcatgtctgacaagagaaatgtcatcctgttctcagtctttgatgagaacaggtcctggtacctgactgaaaacatccagagattcctgcccaaccctgctggggtgcaactggaggaccctgagttccaggcctcaaacataatgcacagcatcaatggctatgtctttgactccctgcaactgtcagtgtgcttgcatgaagtggcctactggtacatcctctccattggggcccagactgacttcctgtcagtgtttttctctggctacaccttcaagcataaaatggtgtatgaggacaccctcaccctgttccccttctctggagagactgtgttcatgagcatggaaaacccaggcctctggatccttggctgtcacaactcagacttcagaaacaggggcatgactgccctgcttaaggtgtccagctgtgacaagaacactggggactactatgaggactcctatgaggacatcagtgcctaccttctgtccaagaacaatgccattgaacctaggagcttcagccagaactccaggcacccaagcaccaggcagaagcagttcaatgccaccaccatccctgagaacactaccctgcaatcagaccaagaagaaattgactatgatgacaccatctcagtggagatgaagaaggaggactttgacatctatgatgaagatgaaaaccaaagccccagatccttccagaaaaagaccaggcactacttcattgcagcagtggagagattatgggactatgggatgtccagctcccctcatgtgctgagaaacagagcacagtctggctcagtgccccagttcaagaaggtggtgttccaggagttcactgatggttccttcacccaaccattgtacaggggagagctgaatgagcacctgggcctgttgggcccatacatcagagcagaagtggaggacaacatcatggtcaccttcagaaaccaggcctccagaccctactccttctactcctccctgatctcctatgaagaggaccaaagacagggagctgagcccagaaagaactttgtgaagccaaatgaaaccaagacctacttctggaaagtgcagcaccacatggcccccaccaaggatgagtttgactgcaaagcttgggcctacttcagtgatgtggacttggagaaggatgtgcactcaggtcttattggccctctgcttgtgtgccataccaacactcttaaccctgcacatggcagacaagtcactgtgcaggagtttgccctcttcttcaccatctttgatgaaacaaagtcctggtacttcacagaaaacatggaaaggaactgcagagccccttgcaacatccagatggaggaccccaccttcaaggaaaactacaggtttcatgccatcaatgggtacatcatggacaccctgcctggactggtcatggcccaggaccagaggatcagatggtatctgctcagcatgggaagcaatgagaacatccactccattcacttcagtggtcatgtgttcactgtcaggaaaaaggaggagtacaagatggccctctacaacctttaccctggagtgtttgaaactgtggaaatgctgccatccaaggctggcatctggagggtggaatgcctcattggtgaacacctccatgctggaatgtccaccctcttcctggtgtacagcaacaagtgccagacccccctgggaatggcttcagggcacatcagagacttccagatcactgcctctgggcagtatggacagtgggcccctaagctggccaggctccactactctggaagcatcaatgcctggtccactaaggagcccttctcctggatcaaagtggatctgctggcccccatgatcatccatggcattaagacccagggggccagacagaagttctcctccctctacataagccagttcattatcatgtacagcctggatgggaagaagtggcagacctacaggggcaactccactggaaccctgatggtgttctttgggaatgtggacagctcaggcatcaagcacaacatcttcaaccccccaatcattgccagatacatcaggctccaccccacccactacagcatcagatccaccctgagaatggaacttatgggctgtgacctcaactcctgtagcatgcccctgggcatggagtccaaggccatttcagatgcccaaatcactgcatcctcctacttcaccaacatgtttgccacttggagcccttccaaggccagactgcatctgcaaggcagatccaatgcctggaggccccaggtcaacaaccctaaggaatggctccaggtggacttccaaaagactatgaaagtcactggagtgaccacccagggagtgaagtccctgctgacctctatgtatgtgaaggaattcctcatctcctcaagccaagatggacaccagtggaccctgttcttccaaaatggaaaggtcaaagtgttccagggcaaccaggacagcttcacccctgtggtgaactccttggacccccccctgttgaccagatacctgaggatccacccccagtcctgggtccaccagattgccttgagaatggaggtgctgggctgtgaagcccaggacctctactaattaattaagagcatcttaccgccatttattcccatatttgttctgtttttcttgatttgggtatacatttaaatgttaataaaacaaaatggtggggcaatcatttacatttttagggatatgtaattactagttcaggtgtattgccacaagacaaacatgttaagaaactttcccgttatttacgctctgttcctgttaatcaacctctggattacaaaatttgtgaaagattgactgatattcttaactatgttgctccttttacgctgtgtggatatgctgctttatagcctctgtatctagctattgcttcccgtacggctttcgttttctcctccttgtataaatcctggttgctgtctcttttagaggagttgtggcccgttgtccgtcaacgtggcgtggtgtgctctgtgtttgctgacgcaacccccactggctggggcattgccaccacctgtcaactcctttctgggactttcgctttccccctcccgatcgccacggcagaactcatcgccgcctgccttgcccgctgctggacaggggctaggttgctgggcactgataattccgtggtgttgtctgtgccttctagttgccagccatctgttgtttgcccctcccccgtgccttccttgaccctggaaggtgccactcccactgtcctttcctaataaaatgaggaaattgcatcgcattgtctgagtaggtgtcattctattctggggggtggggtggggcaggacagcaagggggaggattgggaagacaatagcaggcatgctggggatgcggtgggctctatggctctagagcatggctacgtagataagtagcatggcgggttaatcattaactacacctgcaggaggaacccctagtgatggagttggccactccctctctgcgcgctcgctcgctcactgaggccgggcgaccaaaggtcgcccgacgcccgggcggcctcagtgagcgagcgagcgcgcagctgcctgcagg

SEQ ID NO: 454 - DNA, 6251 bp, Artificial Sequence
  Description of Artificial Sequence: Synthetic polynucleotide
cctgcaggcagctgcgcgctcgctcgctcactgaggccgcccgggcaaagcccgggcgtcgggcgacctttggtcgcccggcctcagtgagcgagcgagcgcgcagagagggagtggccaactccatcactaggggttccttgtagttaatgattaacccgccatgctacttatcgcggccgcgggggaggctgctggtgaatattaaccaaggtcaccccagttatcggaggagcaaacaggggctaagtccaccgggggaggctgctggtgaatattaaccaaggtcaccccagttatcggaggagcaaacaggggctaagtccaccgggggaggctgctggtgaatattaaccaaggtcaccccagttatcggaggagcaaacaggggctaagtccacggtacccactgggaggatgttgagtaagatggaaaactactgatgacccttgcagagacagagtattaggacatgtttgaacaggggccgggcgatcagcaggtagctctagaggatccccgtctgtctgcacatttcgtagagcgagtgttccgatactctaatctccctaggcaaggttcatatttgtgtaggttacttattctccttttgttgactaagtcaataatcagaatcagcaggtttggagtcagcttggcagggatcagcagcctgggttggaaggagggggtataaaagccccttcaccaggagaagccgtcacacagatccacaagctcctgaagaggtaagggtttaagggatggttggttggtggggtattaatgtttaattacctggagcacctgcctgaaatcactttttttcaggttgggtttaaacgccgccaccatgcagattgaactctccacctgtttcttcctgtgcctgctgagattctgcttcagtgccaccaggaggtactacttgggtgcagtggagctctcctgggactacatgcagtcagacctgggagagctccctgtggatgccaggttccctccaagggtccctaaatccttccccttcaacacctcagtggtgtacaagaaaaccctgtttgtggaattcactgaccacctgttcaacattgccaagcccaggccaccctggatggggctcctgggcccaaccatccaagctgaagtgtatgacactgtggtcatcaccctcaagaacatggcctcccaccctgtctccctgcatgctgtgggagtgtcctactggaaggcctcagagggggctgagtatgatgaccagacctcccagagggaaaaggaagatgacaaggtgttcccaggaggatcccacacctatgtgtggcaagtcctgaaggaaaatggtcccatggcatcagaccccttgtgcttgacctactcctacctgagccatgtggacctggtcaaggacctgaactcaggccttattggagccctgcttgtatgcagagagggcagcctggccaaggaaaagacccagaccctgcacaagttcatcctcctgtttgctgtgtttgatgaaggaaagtcctggcactcagagactaagaacagcctgatgcaggacagggatgcagcatcagccagagcctggcccaagatgcacactgtgaatggatatgtgaacaggtccctccctggactaattggatgccacagaaagtctgtgtactggcatgtcattggaatgggcacaacccctgaagtgcatagcatcttcctggaaggacacaccttcctggtcaggaaccacagacaggcatccctggagatctccccaatcaccttcctgactgcccagactctcctgatggacctgggacagttcttgcttttctgccacatctcctcccaccaacatgatggcatggaagcctatgtgaaggtggactcctgccctgaggaacctcaactgaggatgaaaaacaatgaagaagctgaagattatgatgatgacctgactgactcagagatggatgttgtcagatttgatgatgacaacagccctagcttcatccagattagatctgtggccaagaagcaccccaagacctgggtgcactacattgctgctgaggaagaggactgggactatgcccccctggtgctggcccctgatgacagatcctacaagtcccagtacctgaacaatggtccccagagaattgggagaaagtacaagaaagtcagattcatggcctacactgatgaaaccttcaagactagagaagccatccagcatgagtcaggcattctgggtcccctgctgtatggggaagttggtgacaccctgctgatcatcttcaagaaccaagccagcaggccttacaacatctacccccatggaattacagatgtcaggccactgtactccaggagactgcctaagggagtcaagcacctcaaggacttccccatcctgcctggagaaatcttcaagtacaagtggactgtgactgtggaggatgggcctaccaagtcagaccctagatgcctgactaggtactactccagctttgtcaacatggagagagacttggcctcaggactcattggtccactgcttatttgctacaaggagtcagtggaccagagaggaaaccaaatcatgtctgacaagagaaatgtcatcctgttctcagtctttgatgagaacaggtcctggtacctgactgaaaacatccagagattcctgcccaaccctgctggggtgcaactggaggaccctgagttccaggcctcaaacataatgcacagcatcaatggctatgtctttgactccctgcaactgtcagtgtgcttgcatgaagtggcctactggtacatcctctccattggggcccagactgacttcctgtcagtgtttttctctggctacaccttcaagcataaaatggtgtatgaggacaccctcaccctgttccccttctctggagagactgtgttcatgagcatggaaaacccaggcctctggatccttggctgtcacaactcagacttcagaaacaggggcatgactgccctgcttaaggtgtccagctgtgacaagaacactggggactactatgaggactcctatgaggacatcagtgcctaccttctgtccaagaacaatgccattgaacctaggagcttcagccagaactccaggcacccaagcaccaggcagaagcagttcaatgccaccaccatccctgagaacactaccctgcaatcagaccaagaagaaattgactatgatgacaccatctcagtggagatgaagaaggaggactttgacatctatgatgaagatgaaaaccaaagccccagatccttccagaaaaagaccaggcactacttcattgcagcagtggagagattatgggactatgggatgtccagctcccctcatgtgctgagaaacagagcacagtctggctcagtgccccagttcaagaaggtggtgttccaggagttcactgatggttccttcacccaaccattgtacaggggagagctgaatgagcacctgggcctgttgggcccatacatcagagcagaagtggaggacaacatcatggtcaccttcagaaaccaggcctccagaccctactccttctactcctccctgatctcctatgaagaggaccaaagacagggagctgagcccagaaagaactttgtgaagccaaatgaaaccaagacctacttctggaaagtgcagcaccacatggcccccaccaaggatgagtttgactgcaaagcttgggcctacttcagtgatgtggacttggagaaggatgtgcactcaggtcttattggccctctgcttgtgtgccataccaacactcttaaccctgcacatggcagacaagtcactgtgcaggagtttgccctcttcttcaccatctttgatgaaacaaagtcctggtacttcacagaaaacatggaaaggaactgcagagccccttgcaacatccagatggaggaccccaccttcaaggaaaactacaggtttcatgccatcaatgggtacatcatggacaccctgcctggactggtcatggcccaggaccagaggatcagatggtatctgctcagcatgggaagcaatgagaacatccactccattcacttcagtggtcatgtgttcactgtcaggaaaaaggaggagtacaagatggccctctacaacctttaccctggagtgtttgaaactgtggaaatgctgccatccaaggctggcatctggagggtggaatgcctcattggtgaacacctccatgctggaatgtccaccctcttcctggtgtacagcaacaagtgccagacccccctgggaatggcttcagggcacatcagagacttccagatcactgcctctgggcagtatggacagtgggcccctaagctggccaggctccactactctggaagcatcaatgcctggtccactaaggagcccttctcctggatcaaagtggatctgctggcccccatgatcatccatggcattaagacccagggggccagacagaagttctcctccctctacataagccagttcattatcatgtacagcctggatgggaagaagtggcagacctacaggggcaactccactggaaccctgatggtgttctttgggaatgtggacagctcaggcatcaagcacaacatcttcaaccccccaatcattgccagatacatcaggctccaccccacccactacagcatcagatccaccctgagaatggaacttatgggctgtgacctcaactcctgtagcatgcccctgggcatggagtccaaggccatttcagatgcccaaatcactgcatcctcctacttcaccaacatgtttgccacttggagcccttccaaggccagactgcatctgcaaggcagatccaatgcctggaggccccaggtcaacaaccctaaggaatggctccaggtggacttccaaaagactatgaaagtcactggagtgaccacccagggagtgaagtccctgctgacctctatgtatgtgaaggaattcctcatctcctcaagccaagatggacaccagtggaccctgttcttccaaaatggaaaggtcaaagtgttccagggcaaccaggacagcttcacccctgtggtgaactccttggacccccccctgttgaccagatacctgaggatccacccccagtcctgggtccaccagattgccttgagaatggaggtgctgggctgtgaagcccaggacctctactaattaattaagagcatcttaccgccatttattcccatatttgttctgtttttcttgatttgggtatacatttaaatgttaataaaacaaaatggtggggcaatcatttacatttttagggatatgtaattactagttcaggtgtattgccacaagacaaacatgttaagaaactttcccgttatttacgctctgttcctgttaatcaacctctggattacaaaatttgtgaaagattgactgatattcttaactatgttgctccttttacgctgtgtggatatgctgctttatagcctctgtatctagctattgcttcccgtacggctttcgttttctcctccttgtataaatcctggttgctgtctcttttagaggagttgtggcccgttgtccgtcaacgtggcgtggtgtgctctgtgtttgctgacgcaacccccactggctggggcattgccaccacctgtcaactcctttctgggactttcgctttccccctcccgatcgccacggcagaactcatcgccgcctgccttgcccgctgctggacaggggctaggttgctgggcactgataattccgtggtgttgtctgtgccttctagttgccagccatctgttgtttgcccctcccccgtgccttccttgaccctggaaggtgccactcccactgtcctttcctaataaaatgaggaaattgcatcgcattgtctgagtaggtgtcattctattctggggggtggggtggggcaggacagcaagggggaggattgggaagacaatagcaggcatgctggggatgcggtgggctctatggctctagagcatggctacgtagataagtagcatggcgggttaatcattaactacacctgcaggaggaacccctagtgatggagttggccactccctctctgcgcgctcgctcgctcactgaggccgggcgaccaaaggtcgcccgacgcccgggcggcctcagtgagcgagcgagcgcgcagctgcctgcagg

SEQ ID NO: 455 - DNA, 6249 bp, Artificial Sequence
  Description of Artificial Sequence: Synthetic polynucleotide
cctgcaggcagctgcgcgctcgctcgctcactgaggccgcccgggcaaagcccgggcgtcgggcgacctttggtcgcccggcctcagtgagcgagcgagcgcgcagagagggagtggccaactccatcactaggggttccttgtagttaatgattaacccgccatgctacttatcgcggccgcgggggaggctgctggtgaatattaaccaaggtcaccccagttatcggaggagcaaacaggggctaagtccaccgggggaggctgctggtgaatattaaccaaggtcaccccagttatcggaggagcaaacaggggctaagtccaccgggggaggctgctggtgaatattaaccaaggtcaccccagttatcggaggagcaaacaggggctaagtccacggtacccactgggaggatgttgagtaagatggaaaactactgatgacccttgcagagacagagtattaggacatgtttgaacaggggccgggcgatcagcaggtagctctagaggatccccgtctgtctgcacatttcgtagagcgagtgttccgatactctaatctccctaggcaaggttcatatttgtgtaggttacttattctccttttgttgactaagtcaataatcagaatcagcaggtttggagtcagcttggcagggatcagcagcctgggttggaaggagggggtataaaagccccttcaccaggagaagccgtcacacagatccacaagctcctgaagaggtaagggtttaagggatggttggttggtggggtattaatgtttaattacctggagcacctgcctgaaatcactttttttcaggttgggtttaaacagccaccatgcagattgaactctccacctgtttcttcctgtgcctgctgagattctgcttcagtgccaccaggaggtactacttgggtgcagtggagctctcctgggactacatgcagtcagacctgggagagctccctgtggatgccaggttccctccaagggtccctaaatccttccccttcaacacctcagtggtgtacaagaaaaccctgtttgtggaattcactgaccacctgttcaacattgccaagcccaggccaccctggatggggctcctgggcccaaccatccaagctgaagtgtatgacactgtggtcatcaccctcaagaacatggcctcccaccctgtctccctgcatgctgtgggagtgtcctactggaaggcctcagagggggctgagtatgatgaccagacctcccagagggaaaaggaagatgacaaggtgttcccaggaggatcccacacctatgtgtggcaagtcctgaaggaaaatggtcccatggcatcagaccccttgtgcttgacctactcctacctgagccatgtggacctggtcaaggacctgaactcaggccttattggagccctgcttgtatgcagagagggcagcctggccaaggaaaagacccagaccctgcacaagttcatcctcctgtttgctgtgtttgatgaaggaaagtcctggcactcagagactaagaacagcctgatgcaggacagggatgcagcatcagccagagcctggcccaagatgcacactgtgaatggatatgtgaacaggtccctccctggactaattggatgccacagaaagtctgtgtactggcatgtcattggaatgggcacaacccctgaagtgcatagcatcttcctggaaggacacaccttcctggtcaggaaccacagacaggcatccctggagatctccccaatcaccttcctgactgcccagactctcctgatggacctgggacagttcttgcttttctgccacatctcctcccaccaacatgatggcatggaagcctatgtgaaggtggactcctgccctgaggaacctcaactgaggatgaaaaacaatgaagaagctgaagattatgatgatgacctgactgactcagagatggatgttgtcagatttgatgatgacaacagccctagcttcatccagattagatctgtggccaagaagcaccccaagacctgggtgcactacattgctgctgaggaagaggactgggactatgcccccctggtgctggcccctgatgacagatcctacaagtcccagtacctgaacaatggtccccagagaattgggagaaagtacaagaaagtcagattcatggcctacactgatgaaaccttcaagactagagaagccatccagcatgagtcaggcattctgggtcccctgctgtatggggaagttggtgacaccctgctgatcatcttcaagaaccaagccagcaggccttacaacatctacccccatggaattacagatgtcaggccactgtactccaggagactgcctaagggagtcaagcacctcaaggacttccccatcctgcctggagaaatcttcaagtacaagtggactgtgactgtggaggatgggcctaccaagtcagaccctagatgcctgactaggtactactccagctttgtcaacatggagagagacttggcctcaggactcattggtccactgcttatttgctacaaggagtcagtggaccagagaggaaaccaaatcatgtctgacaagagaaatgtcatcctgttctcagtctttgatgagaacaggtcctggtacctgactgaaaacatccagagattcctgcccaaccctgctggggtgcaactggaggaccctgagttccaggcctcaaacataatgcacagcatcaatggctatgtctttgactccctgcaactgtcagtgtgcttgcatgaagtggcctactggtacatcctctccattggggcccagactgacttcctgtcagtgtttttctctggctacaccttcaagcataaaatggtgtatgaggacaccctcaccctgttccccttctctggagagactgtgttcatgagcatggaaaacccaggcctctggatccttggctgtcacaactcagacttcagaaacaggggcatgactgccctgcttaaggtgtccagctgtgacaagaacactggggactactatgaggactcctatgaggacatcagtgcctaccttctgtccaagaacaatgccattgaacctaggagcttcagccagaactccaggcacccaagcaccaggcagaagcagttcaatgccaccaccatccctgagaacactaccctgcaatcagaccaagaagaaattgactatgatgacaccatctcagtggagatgaagaaggaggactttgacatctatgatgaagatgaaaaccaaagccccagatccttccagaaaaagaccaggcactacttcattgcagcagtggagagattatgggactatgggatgtccagctcccctcatgtgctgagaaacagagcacagtctggctcagtgccccagttcaagaaggtggtgttccaggagttcactgatggttccttcacccaaccattgtacaggggagagctgaatgagcacctgggcctgttgggcccatacatcagagcagaagtggaggacaacatcatggtcaccttcagaaaccaggcctccagaccctactccttctactcctccctgatctcctatgaagaggaccaaagacagggagctgagcccagaaagaactttgtgaagccaaatgaaaccaagacctacttctggaaagtgcagcaccacatggcccccaccaaggatgagtttgactgcaaagcttgggcctacttcagtgatgtggacttggagaaggatgtgcactcaggtcttattggccctctgcttgtgtgccataccaacactcttaaccctgcacatggcagacaagtcactgtgcaggagtttgccctcttcttcaccatctttgatgaaacaaagtcctggtacttcacagaaaacatggaaaggaactgcagagccccttgcaacatccagatggaggaccccaccttcaaggaaaactacaggtttcatgccatcaatgggtacatcatggacaccctgcctggactggtcatggcccaggaccagaggatcagatggtatctgctcagcatgggaagcaatgagaacatccactccattcacttcagtggtcatgtgttcactgtcaggaaaaaggaggagtacaagatggccctctacaacctttaccctggagtgtttgaaactgtggaaatgctgccatccaaggctggcatctggagggtggaatgcctcattggtgaacacctccatgctggaatgtccaccctcttcctggtgtacagcaacaagtgccagacccccctgggaatggcttcagggcacatcagagacttccagatcactgcctctgggcagtatggacagtgggcccctaagctggccaggctccactactctggaagcatcaatgcctggtccactaaggagcccttctcctggatcaaagtggatctgctggcccccatgatcatccatggcattaagacccagggggccagacagaagttctcctccctctacataagccagttcattatcatgtacagcctggatgggaagaagtggcagacctacaggggcaactccactggaaccctgatggtgttctttgggaatgtggacagctcaggcatcaagcacaacatcttcaaccccccaatcattgccagatacatcaggctccaccccacccactacagcatcagatccaccctgagaatggaacttatgggctgtgacctcaactcctgtagcatgcccctgggcatggagtccaaggccatttcagatgcccaaatcactgcatcctcctacttcaccaacatgtttgccacttggagcccttccaaggccagactgcatctgcaaggcagatccaatgcctggaggccccaggtcaacaaccctaaggaatggctccaggtggacttccaaaagactatgaaagtcactggagtgaccacccagggagtgaagtccctgctgacctctatgtatgtgaaggaattcctcatctcctcaagccaagatggacaccagtggaccctgttcttccaaaatggaaaggtcaaagtgttccagggcaaccaggacagcttcacccctgtggtgaactccttggacccccccctgttgaccagatacctgaggatccacccccagtcctgggtccaccagattgccttgagaatggaggtgctgggctgtgaagcccaggacctctactaattaattaagagcatcttaccgccatttattcccatatttgttctgtttttcttgatttgggtatacatttaaatgttaataaaacaaaatggtggggcaatcatttacatttttagggatatgtaattactagttcaggtgtattgccacaagacaaacatgttaagaaactttcccgttatttacgctctgttcctgttaatcaacctctggattacaaaatttgtgaaagattgactgatattcttaactatgttgctccttttacgctgtgtggatatgctgctttatagcctctgtatctagctattgcttcccgtacggctttcgttttctcctccttgtataaatcctggttgctgtctcttttagaggagttgtggcccgttgtccgtcaacgtggcgtggtgtgctctgtgtttgctgacgcaacccccactggctggggcattgccaccacctgtcaactcctttctgggactttcgctttccccctcccgatcgccacggcagaactcatcgccgcctgccttgcccgctgctggacaggggctaggttgctgggcactgataattccgtggtgttgtctgtgccttctagttgccagccatctgttgtttgcccctcccccgtgccttccttgaccctggaaggtgccactcccactgtcctttcctaataaaatgaggaaattgcatcgcattgtctgagtaggtgtcattctattctggggggtggggtggggcaggacagcaagggggaggattgggaagacaatagcaggcatgctggggatgcggtgggctctatggctctagagcatggctacgtagataagtagcatggcgggttaatcattaactacacctgcaggaggaacccctagtgatggagttggccactccctctctgcgcgctcgctcgctcactgaggccgggcgaccaaaggtcgcccgacgcccgggcggcctcagtgagcgagcgagcgcgcagctgcctgcagg

SEQ ID NO: 456 - DNA, 6252 bp, Artificial Sequence
  Description of Artificial Sequence: Synthetic polynucleotide
cctgcaggcagctgcgcgctcgctcgctcactgaggccgcccgggcaaagcccgggcgtcgggcgacctttggtcgcccggcctcagtgagcgagcgagcgcgcagagagggagtggccaactccatcactaggggttccttgtagttaatgattaacccgccatgctacttatcgcggccgcgggggaggctgctggtgaatattaaccaaggtcaccccagttatcggaggagcaaacaggggctaagtccaccgggggaggctgctggtgaatattaaccaaggtcaccccagttatcggaggagcaaacaggggctaagtccaccgggggaggctgctggtgaatattaaccaaggtcaccccagttatcggaggagcaaacaggggctaagtccacggtacccactgggaggatgttgagtaagatggaaaactactgatgacccttgcagagacagagtattaggacatgtttgaacaggggccgggcgatcagcaggtagctctagaggatccccgtctgtctgcacatttcgtagagcgagtgttccgatactctaatctccctaggcaaggttcatatttgtgtaggttacttattctccttttgttgactaagtcaataatcagaatcagcaggtttggagtcagcttggcagggatcagcagcctgggttggaaggagggggtataaaagccccttcaccaggagaagccgtcacacagatccacaagctcctgaagaggtaagggtttaagggatggttggttggtggggtattaatgtttaattacctggagcacctgcctgaaatcactttttttcaggttgggtttaaaccgcagccaccatgcagattgaactctccacctgtttcttcctgtgcctgctgagattctgcttcagtgccaccaggaggtactacttgggtgcagtggagctctcctgggactacatgcagtcagacctgggagagctccctgtggatgccaggttccctccaagggtccctaaatccttccccttcaacacctcagtggtgtacaagaaaaccctgtttgtggaattcactgaccacctgttcaacattgccaagcccaggccaccctggatggggctcctgggcccaaccatccaagctgaagtgtatgacactgtggtcatcaccctcaagaacatggcctcccaccctgtctccctgcatgctgtgggagtgtcctactggaaggcctcagagggggctgagtatgatgaccagacctcccagagggaaaaggaagatgacaaggtgttcccaggaggatcccacacctatgtgtggcaagtcctgaaggaaaatggtcccatggcatcagaccccttgtgcttgacctactcctacctgagccatgtggacctggtcaaggacctgaactcaggccttattggagccctgcttgtatgcagagagggcagcctggccaaggaaaagacccagaccctgcacaagttcatcctcctgtttgctgtgtttgatgaaggaaagtcctggcactcagagactaagaacagcctgatgcaggacagggatgcagcatcagccagagcctggcccaagatgcacactgtgaatggatatgtgaacaggtccctccctggactaattggatgccacagaaagtctgtgtactggcatgtcattggaatgggcacaacccctgaagtgcatagcatcttcctggaaggacacaccttcctggtcaggaaccacagacaggcatccctggagatctccccaatcaccttcctgactgcccagactctcctgatggacctgggacagttcttgcttttctgccacatctcctcccaccaacatgatggcatggaagcctatgtgaaggtggactcctgccctgaggaacctcaactgaggatgaaaaacaatgaagaagctgaagattatgatgatgacctgactgactcagagatggatgttgtcagatttgatgatgacaacagccctagcttcatccagattagatctgtggccaagaagcaccccaagacctgggtgcactacattgctgctgaggaagaggactgggactatgcccccctggtgctggcccctgatgacagatcctacaagtcccagtacctgaacaatggtccccagagaattgggagaaagtacaagaaagtcagattcatggcctacactgatgaaaccttcaagactagagaagccatccagcatgagtcaggcattctgggtcccctgctgtatggggaagttggtgacaccctgctgatcatcttcaagaaccaagccagcaggccttacaacatctacccccatggaattacagatgtcaggccactgtactccaggagactgcctaagggagtcaagcacctcaaggacttccccatcctgcctggagaaatcttcaagtacaagtggactgtgactgtggaggatgggcctaccaagtcagaccctagatgcctgactaggtactactccagctttgtcaacatggagagagacttggcctcaggactcattggtccactgcttatttgctacaaggagtcagtggaccagagaggaaaccaaatcatgtctgacaagagaaatgtcatcctgttctcagtctttgatgagaacaggtcctggtacctgactgaaaacatccagagattcctgcccaaccctgctggggtgcaactggaggaccctgagttccaggcctcaaacataatgcacagcatcaatggctatgtctttgactccctgcaactgtcagtgtgcttgcatgaagtggcctactggtacatcctctccattggggcccagactgacttcctgtcagtgtttttctctggctacaccttcaagcataaaatggtgtatgaggacaccctcaccctgttccccttctctggagagactgtgttcatgagcatggaaaacccaggcctctggatccttggctgtcacaactcagacttcagaaacaggggcatgactgccctgcttaaggtgtccagctgtgacaagaacactggggactactatgaggactcctatgaggacatcagtgcctaccttctgtccaagaacaatgccattgaacctaggagcttcagccagaactccaggcacccaagcaccaggcagaagcagttcaatgccaccaccatccctgagaacactaccctgcaatcagaccaagaagaaattgactatgatgacaccatctcagtggagatgaagaaggaggactttgacatctatgatgaagatgaaaaccaaagccccagatccttccagaaaaagaccaggcactacttcattgcagcagtggagagattatgggactatgggatgtccagctcccctcatgtgctgagaaacagagcacagtctggctcagtgccccagttcaagaaggtggtgttccaggagttcactgatggttccttcacccaaccattgtacaggggagagctgaatgagcacctgggcctgttgggcccatacatcagagcagaagtggaggacaacatcatggtcaccttcagaaaccaggcctccagaccctactccttctactcctccctgatctcctatgaagaggaccaaagacagggagctgagcccagaaagaactttgtgaagccaaatgaaaccaagacctacttctggaaagtgcagcaccacatggcccccaccaaggatgagtttgactgcaaagcttgggcctacttcagtgatgtggacttggagaaggatgtgcactcaggtcttattggccctctgcttgtgtgccataccaacactcttaaccctgcacatggcagacaagtcactgtgcaggagtttgccctcttcttcaccatctttgatgaaacaaagtcctggtacttcacagaaaacatggaaaggaactgcagagccccttgcaacatccagatggaggaccccaccttcaaggaaaactacaggtttcatgccatcaatgggtacatcatggacaccctgcctggactggtcatggcccaggaccagaggatcagatggtatctgctcagcatgggaagcaatgagaacatccactccattcacttcagtggtcatgtgttcactgtcaggaaaaaggaggagtacaagatggccctctacaacctttaccctggagtgtttgaaactgtggaaatgctgccatccaaggctggcatctggagggtggaatgcctcattggtgaacacctccatgctggaatgtccaccctcttcctggtgtacagcaacaagtgccagacccccctgggaatggcttcagggcacatcagagacttccagatcactgcctctgggcagtatggacagtgggcccctaagctggccaggctccactactctggaagcatcaatgcctggtccactaaggagcccttctcctggatcaaagtggatctgctggcccccatgatcatccatggcattaagacccagggggccagacagaagttctcctccctctacataagccagttcattatcatgtacagcctggatgggaagaagtggcagacctacaggggcaactccactggaaccctgatggtgttctttgggaatgtggacagctcaggcatcaagcacaacatcttcaaccccccaatcattgccagatacatcaggctccaccccacccactacagcatcagatccaccctgagaatggaacttatgggctgtgacctcaactcctgtagcatgcccctgggcatggagtccaaggccatttcagatgcccaaatcactgcatcctcctacttcaccaacatgtttgccacttggagcccttccaaggccagactgcatctgcaaggcagatccaatgcctggaggccccaggtcaacaaccctaaggaatggctccaggtggacttccaaaagactatgaaagtcactggagtgaccacccagggagtgaagtccctgctgacctctatgtatgtgaaggaattcctcatctcctcaagccaagatggacaccagtggaccctgttcttccaaaatggaaaggtcaaagtgttccagggcaaccaggacagcttcacccctgtggtgaactccttggacccccccctgttgaccagatacctgaggatccacccccagtcctgggtccaccagattgccttgagaatggaggtgctgggctgtgaagcccaggacctctactaattaattaagagcatcttaccgccatttattcccatatttgttctgtttttcttgatttgggtatacatttaaatgttaataaaacaaaatggtggggcaatcatttacatttttagggatatgtaattactagttcaggtgtattgccacaagacaaacatgttaagaaactttcccgttatttacgctctgttcctgttaatcaacctctggattacaaaatttgtgaaagattgactgatattcttaactatgttgctccttttacgctgtgtggatatgctgctttatagcctctgtatctagctattgcttcccgtacggctttcgttttctcctccttgtataaatcctggttgctgtctcttttagaggagttgtggcccgttgtccgtcaacgtggcgtggtgtgctctgtgtttgctgacgcaacccccactggctggggcattgccaccacctgtcaactcctttctgggactttcgctttccccctcccgatcgccacggcagaactcatcgccgcctgccttgcccgctgctggacaggggctaggttgctgggcactgataattccgtggtgttgtctgtgccttctagttgccagccatctgttgtttgcccctcccccgtgccttccttgaccctggaaggtgccactcccactgtcctttcctaataaaatgaggaaattgcatcgcattgtctgagtaggtgtcattctattctggggggtggggtggggcaggacagcaagggggaggattgggaagacaatagcaggcatgctggggatgcggtgggctctatggctctagagcatggctacgtagataagtagcatggcgggttaatcattaactacacctgcaggaggaacccctagtgatggagttggccactccctctctgcgcgctcgctcgctcactgaggccgggcgaccaaaggtcgcccgacgcccgggcggcctcagtgagcgagcgagcgcgcagctgcctgcagg

SEQ ID NO: 457 - DNA, 6316 bp, Artificial Sequence
  Description of Artificial Sequence: Synthetic polynucleotide
cctgcaggcagctgcgcgctcgctcgctcactgaggccgcccgggcaaagcccgggcgtcgggcgacctttggtcgcccggcctcagtgagcgagcgagcgcgcagagagggagtggccaactccatcactaggggttccttgtagttaatgattaacccgccatgctacttatcgcggccgcgggggaggctgctggtgaatattaaccaaggtcaccccagttatcggaggagcaaacaggggctaagtccaccgggggaggctgctggtgaatattaaccaaggtcaccccagttatcggaggagcaaacaggggctaagtccaccgggggaggctgctggtgaatattaaccaaggtcaccccagttatcggaggagcaaacaggggctaagtccacggtacccactgggaggatgttgagtaagatggaaaactactgatgacccttgcagagacagagtattaggacatgtttgaacaggggccgggcgatcagcaggtagctctagaggatccccgtctgtctgcacatttcgtagagcgagtgttccgatactctaatctccctaggcaaggttcatatttgtgtaggttacttattctccttttgttgactaagtcaataatcagaatcagcaggtttggagtcagcttggcagggatcagcagcctgggttggaaggagggggtataaaagccccttcaccaggagaagccgtcacacagatccacaagctcctgaagaggtaagggtttaagggatggttggttggtggggtattaatgtttaattacctggagcacctgcctgaaatcactttttttcaggttggtttaaacgggacatcgtagagagtcgtacttacatttcgtgggctaagtttaagctactctcgctccgggataagagtttcaatgcagattgaactctccacctgtttcttcctgtgcctgctgagattctgcttcagtgccaccaggaggtactacttgggtgcagtggagctctcctgggactacatgcagtcagacctgggagagctccctgtggatgccaggttccctccaagggtccctaaatccttccccttcaacacctcagtggtgtacaagaaaaccctgtttgtggaattcactgaccacctgttcaacattgccaagcccaggccaccctggatggggctcctgggcccaaccatccaagctgaagtgtatgacactgtggtcatcaccctcaagaacatggcctcccaccctgtctccctgcatgctgtgggagtgtcctactggaaggcctcagagggggctgagtatgatgaccagacctcccagagggaaaaggaagatgacaaggtgttcccaggaggatcccacacctatgtgtggcaagtcctgaaggaaaatggtcccatggcatcagaccccttgtgcttgacctactcctacctgagccatgtggacctggtcaaggacctgaactcaggccttattggagccctgcttgtatgcagagagggcagcctggccaaggaaaagacccagaccctgcacaagttcatcctcctgtttgctgtgtttgatgaaggaaagtcctggcactcagagactaagaacagcctgatgcaggacagggatgcagcatcagccagagcctggcccaagatgcacactgtgaatggatatgtgaacaggtccctccctggactaattggatgccacagaaagtctgtgtactggcatgtcattggaatgggcacaacccctgaagtgcatagcatcttcctggaaggacacaccttcctggtcaggaaccacagacaggcatccctggagatctccccaatcaccttcctgactgcccagactctcctgatggacctgggacagttcttgcttttctgccacatctcctcccaccaacatgatggcatggaagcctatgtgaaggtggactcctgccctgaggaacctcaactgaggatgaaaaacaatgaagaagctgaagattatgatgatgacctgactgactcagagatggatgttgtcagatttgatgatgacaacagccctagcttcatccagattagatctgtggccaagaagcaccccaagacctgggtgcactacattgctgctgaggaagaggactgggactatgcccccctggtgctggcccctgatgacagatcctacaagtcccagtacctgaacaatggtccccagagaattgggagaaagtacaagaaagtcagattcatggcctacactgatgaaaccttcaagactagagaagccatccagcatgagtcaggcattctgggtcccctgctgtatggggaagttggtgacaccctgctgatcatcttcaagaaccaagccagcaggccttacaacatctacccccatggaattacagatgtcaggccactgtactccaggagactgcctaagggagtcaagcacctcaaggacttccccatcctgcctggagaaatcttcaagtacaagtggactgtgactgtggaggatgggcctaccaagtcagaccctagatgcctgactaggtactactccagctttgtcaacatggagagagacttggcctcaggactcattggtccactgcttatttgctacaaggagtcagtggaccagagaggaaaccaaatcatgtctgacaagagaaatgtcatcctgttctcagtctttgatgagaacaggtcctggtacctgactgaaaacatccagagattcctgcccaaccctgctggggtgcaactggaggaccctgagttccaggcctcaaacataatgcacagcatcaatggctatgtctttgactccctgcaactgtcagtgtgcttgcatgaagtggcctactggtacatcctctccattggggcccagactgacttcctgtcagtgtttttctctggctacaccttcaagcataaaatggtgtatgaggacaccctcaccctgttccccttctctggagagactgtgttcatgagcatggaaaacccaggcctctggatccttggctgtcacaactcagacttcagaaacaggggcatgactgccctgcttaaggtgtccagctgtgacaagaacactggggactactatgaggactcctatgaggacatcagtgcctaccttctgtccaagaacaatgccattgaacctaggagcttcagccagaactccaggcacccaagcaccaggcagaagcagttcaatgccaccaccatccctgagaacactaccctgcaatcagaccaagaagaaattgactatgatgacaccatctcagtggagatgaagaaggaggactttgacatctatgatgaagatgaaaaccaaagccccagatccttccagaaaaagaccaggcactacttcattgcagcagtggagagattatgggactatgggatgtccagctcccctcatgtgctgagaaacagagcacagtctggctcagtgccccagttcaagaaggtggtgttccaggagttcactgatggttccttcacccaaccattgtacaggggagagctgaatgagcacctgggcctgttgggcccatacatcagagcagaagtggaggacaacatcatggtcaccttcagaaaccaggcctccagaccctactccttctactcctccctgatctcctatgaagaggaccaaagacagggagctgagcccagaaagaactttgtgaagccaaatgaaaccaagacctacttctggaaagtgcagcaccacatggcccccaccaaggatgagtttgactgcaaagcttgggcctacttcagtgatgtggacttggagaaggatgtgcactcaggtcttattggccctctgcttgtgtgccataccaacactcttaaccctgcacatggcagacaagtcactgtgcaggagtttgccctcttcttcaccatctttgatgaaacaaagtcctggtacttcacagaaaacatggaaaggaactgcagagccccttgcaacatccagatggaggaccccaccttcaaggaaaactacaggtttcatgccatcaatgggtacatcatggacaccctgcctggactggtcatggcccaggaccagaggatcagatggtatctgctcagcatgggaagcaatgagaacatccactccattcacttcagtggtcatgtgttcactgtcaggaaaaaggaggagtacaagatggccctctacaacctttaccctggagtgtttgaaactgtggaaatgctgccatccaaggctggcatctggagggtggaatgcctcattggtgaacacctccatgctggaatgtccaccctcttcctggtgtacagcaacaagtgccagacccccctgggaatggcttcagggcacatcagagacttccagatcactgcctctgggcagtatggacagtgggcccctaagctggccaggctccactactctggaagcatcaatgcctggtccactaaggagcccttctcctggatcaaagtggatctgctggcccccatgatcatccatggcattaagacccagggggccagacagaagttctcctccctctacataagccagttcattatcatgtacagcctggatgggaagaagtggcagacctacaggggcaactccactggaaccctgatggtgttctttgggaatgtggacagctcaggcatcaagcacaacatcttcaaccccccaatcattgccagatacatcaggctccaccccacccactacagcatcagatccaccctgagaatggaacttatgggctgtgacctcaactcctgtagcatgcccctgggcatggagtccaaggccatttcagatgcccaaatcactgcatcctcctacttcaccaacatgtttgccacttggagcccttccaaggccagactgcatctgcaaggcagatccaatgcctggaggccccaggtcaacaaccctaaggaatggctccaggtggacttccaaaagactatgaaagtcactggagtgaccacccagggagtgaagtccctgctgacctctatgtatgtgaaggaattcctcatctcctcaagccaagatggacaccagtggaccctgttcttccaaaatggaaaggtcaaagtgttccagggcaaccaggacagcttcacccctgtggtgaactccttggacccccccctgttgaccagatacctgaggatccacccccagtcctgggtccaccagattgccttgagaatggaggtgctgggctgtgaagcccaggacctctactaattaattaagagcatcttaccgccatttattcccatatttgttctgtttttcttgatttgggtatacatttaaatgttaataaaacaaaatggtggggcaatcatttacatttttagggatatgtaattactagttcaggtgtattgccacaagacaaacatgttaagaaactttcccgttatttacgctctgttcctgttaatcaacctctggattacaaaatttgtgaaagattgactgatattcttaactatgttgctccttttacgctgtgtggatatgctgctttatagcctctgtatctagctattgcttcccgtacggctttcgttttctcctccttgtataaatcctggttgctgtctcttttagaggagttgtggcccgttgtccgtcaacgtggcgtggtgtgctctgtgtttgctgacgcaacccccactggctggggcattgccaccacctgtcaactcctttctgggactttcgctttccccctcccgatcgccacggcagaactcatcgccgcctgccttgcccgctgctggacaggggctaggttgctgggcactgataattccgtggtgttgtctgtgccttctagttgccagccatctgttgtttgcccctcccccgtgccttccttgaccctggaaggtgccactcccactgtcctttcctaataaaatgaggaaattgcatcgcattgtctgagtaggtgtcattctattctggggggtggggtggggcaggacagcaagggggaggattgggaagacaatagcaggcatgctggggatgcggtgggctctatggctctagagcatggctacgtagataagtagcatggcgggttaatcattaactacacctgcaggaggaacccctagtgatggagttggccactccctctctgcgcgctcgctcgctcactgaggccgggcgaccaaaggtcgcccgacgcccgggcggcctcagtgagcgagcgagcgcgcagctgcctgcagg

SEQ ID NO: 458 - DNA, 6248 bp, Artificial Sequence
  Description of Artificial Sequence: Synthetic polynucleotide
cctgcaggcagctgcgcgctcgctcgctcactgaggccgcccgggcaaagcccgggcgtcgggcgacctttggtcgcccggcctcagtgagcgagcgagcgcgcagagagggagtggccaactccatcactaggggttccttgtagttaatgattaacccgccatgctacttatcgcggccgcgggggaggctgctggtgaatattaaccaaggtcaccccagttatcggaggagcaaacaggggctaagtccaccgggggaggctgctggtgaatattaaccaaggtcaccccagttatcggaggagcaaacaggggctaagtccaccgggggaggctgctggtgaatattaaccaaggtcaccccagttatcggaggagcaaacaggggctaagtccacggtacccactgggaggatgttgagtaagatggaaaactactgatgacccttgcagagacagagtattaggacatgtttgaacaggggccgggcgatcagcaggtagctctagaggatccccgtctgtctgcacatttcgtagagcgagtgttccgatactctaatctccctaggcaaggttcatatttgtgtaggttacttattctccttttgttgactaagtcaataatcagaatcagcaggtttggagtcagcttggcagggatcagcagcctgggttggaaggagggggtataaaagccccttcaccaggagaagccgtcacacagatccacaagctcctgaagaggtaagggtttaagggatggttggttggtggggtattaatgtttaattacctggagcacctgcctgaaatcactttttttcaggttggtttaaacagccaccatgcagattgaactctccacctgtttcttcctgtgcctgctgagattctgcttcagtgccaccaggaggtactacttgggtgcagtggagctctcctgggactacatgcagtcagacctgggagagctccctgtggatgccaggttccctccaagggtccctaaatccttccccttcaacacctcagtggtgtacaagaaaaccctgtttgtggaattcactgaccacctgttcaacattgccaagcccaggccaccctggatggggctcctgggcccaaccatccaagctgaagtgtatgacactgtggtcatcaccctcaagaacatggcctcccaccctgtctccctgcatgctgtgggagtgtcctactggaaggcctcagagggggctgagtatgatgaccagacctcccagagggaaaaggaagatgacaaggtgttcccaggaggatcccacacctatgtgtggcaagtcctgaaggaaaatggtcccatggcatcagaccccttgtgcttgacctactcctacctgagccatgtggacctggtcaaggacctgaactcaggccttattggagccctgcttgtatgcagagagggcagcctggccaaggaaaagacccagaccctgcacaagttcatcctcctgtttgctgtgtttgatgaaggaaagtcctggcactcagagactaagaacagcctgatgcaggacagggatgcagcatcagccagagcctggcccaagatgcacactgtgaatggatatgtgaacaggtccctccctggactaattggatgccacagaaagtctgtgtactggcatgtcattggaatgggcacaacccctgaagtgcatagcatcttcctggaaggacacaccttcctggtcaggaaccacagacaggcatccctggagatctccccaatcaccttcctgactgcccagactctcctgatggacctgggacagttcttgcttttctgccacatctcctcccaccaacatgatggcatggaagcctatgtgaaggtggactcctgccctgaggaacctcaactgaggatgaaaaacaatgaagaagctgaagattatgatgatgacctgactgactcagagatggatgttgtcagatttgatgatgacaacagccctagcttcatccagattagatctgtggccaagaagcaccccaagacctgggtgcactacattgctgctgaggaagaggactgggactatgcccccctggtgctggcccctgatgacagatcctacaagtcccagtacctgaacaatggtccccagagaattgggagaaagtacaagaaagtcagattcatggcctacactgatgaaaccttcaagactagagaagccatccagcatgagtcaggcattctgggtcccctgctgtatggggaagttggtgacaccctgctgatcatcttcaagaaccaagccagcaggccttacaacatctacccccatggaattacagatgtcaggccactgtactccaggagactgcctaagggagtcaagcacctcaaggacttccccatcctgcctggagaaatcttcaagtacaagtggactgtgactgtggaggatgggcctaccaagtcagaccctagatgcctgactaggtactactccagctttgtcaacatggagagagacttggcctcaggactcattggtccactgcttatttgctacaaggagtcagtggaccagagaggaaaccaaatcatgtctgacaagagaaatgtcatcctgttctcagtctttgatgagaacaggtcctggtacctgactgaaaacatccagagattcctgcccaaccctgctggggtgcaactggaggaccctgagttccaggcctcaaacataatgcacagcatcaatggctatgtctttgactccctgcaactgtcagtgtgcttgcatgaagtggcctactggtacatcctctccattggggcccagactgacttcctgtcagtgtttttctctggctacaccttcaagcataaaatggtgtatgaggacaccctcaccctgttccccttctctggagagactgtgttcatgagcatggaaaacccaggcctctggatccttggctgtcacaactcagacttcagaaacaggggcatgactgccctgcttaaggtgtccagctgtgacaagaacactggggactactatgaggactcctatgaggacatcagtgcctaccttctgtccaagaacaatgccattgaacctaggagcttcagccagaactccaggcacccaagcaccaggcagaagcagttcaatgccaccaccatccctgagaacactaccctgcaatcagaccaagaagaaattgactatgatgacaccatctcagtggagatgaagaaggaggactttgacatctatgatgaagatgaaaaccaaagccccagatccttccagaaaaagaccaggcactacttcattgcagcagtggagagattatgggactatgggatgtccagctcccctcatgtgctgagaaacagagcacagtctggctcagtgccccagttcaagaaggtggtgttccaggagttcactgatggttccttcacccaaccattgtacaggggagagctgaatgagcacctgggcctgttgggcccatacatcagagcagaagtggaggacaacatcatggtcaccttcagaaaccaggcctccagaccctactccttctactcctccctgatctcctatgaagaggaccaaagacagggagctgagcccagaaagaactttgtgaagccaaatgaaaccaagacctacttctggaaagtgcagcaccacatggcccccaccaaggatgagtttgactgcaaagcttgggcctacttcagtgatgtggacttggagaaggatgtgcactcaggtcttattggccctctgcttgtgtgccataccaacactcttaaccctgcacatggcagacaagtcactgtgcaggagtttgccctcttcttcaccatctttgatgaaacaaagtcctggtacttcacagaaaacatggaaaggaactgcagagccccttgcaacatccagatggaggaccccaccttcaaggaaaactacaggtttcatgccatcaatgggtacatcatggacaccctgcctggactggtcatggcccaggaccagaggatcagatggtatctgctcagcatgggaagcaatgagaacatccactccattcacttcagtggtcatgtgttcactgtcaggaaaaaggaggagtacaagatggccctctacaacctttaccctggagtgtttgaaactgtggaaatgctgccatccaaggctggcatctggagggtggaatgcctcattggtgaacacctccatgctggaatgtccaccctcttcctggtgtacagcaacaagtgccagacccccctgggaatggcttcagggcacatcagagacttccagatcactgcctctgggcagtatggacagtgggcccctaagctggccaggctccactactctggaagcatcaatgcctggtccactaaggagcccttctcctggatcaaagtggatctgctggcccccatgatcatccatggcattaagacccagggggccagacagaagttctcctccctctacataagccagttcattatcatgtacagcctggatgggaagaagtggcagacctacaggggcaactccactggaaccctgatggtgttctttgggaatgtggacagctcaggcatcaagcacaacatcttcaaccccccaatcattgccagatacatcaggctccaccccacccactacagcatcagatccaccctgagaatggaacttatgggctgtgacctcaactcctgtagcatgcccctgggcatggagtccaaggccatttcagatgcccaaatcactgcatcctcctacttcaccaacatgtttgccacttggagcccttccaaggccagactgcatctgcaaggcagatccaatgcctggaggccccaggtcaacaaccctaaggaatggctccaggtggacttccaaaagactatgaaagtcactggagtgaccacccagggagtgaagtccctgctgacctctatgtatgtgaaggaattcctcatctcctcaagccaagatggacaccagtggaccctgttcttccaaaatggaaaggtcaaagtgttccagggcaaccaggacagcttcacccctgtggtgaactccttggacccccccctgttgaccagatacctgaggatccacccccagtcctgggtccaccagattgccttgagaatggaggtgctgggctgtgaagcccaggacctctactaattaattaagagcatcttaccgccatttattcccatatttgttctgtttttcttgatttgggtatacatttaaatgttaataaaacaaaatggtggggcaatcatttacatttttagggatatgtaattactagttcaggtgtattgccacaagacaaacatgttaagaaactttcccgttatttacgctctgttcctgttaatcaacctctggattacaaaatttgtgaaagattgactgatattcttaactatgttgctccttttacgctgtgtggatatgctgctttatagcctctgtatctagctattgcttcccgtacggctttcgttttctcctccttgtataaatcctggttgctgtctcttttagaggagttgtggcccgttgtccgtcaacgtggcgtggtgtgctctgtgtttgctgacgcaacccccactggctggggcattgccaccacctgtcaactcctttctgggactttcgctttccccctcccgatcgccacggcagaactcatcgccgcctgccttgcccgctgctggacaggggctaggttgctgggcactgataattccgtggtgttgtctgtgccttctagttgccagccatctgttgtttgcccctcccccgtgccttccttgaccctggaaggtgccactcccactgtcctttcctaataaaatgaggaaattgcatcgcattgtctgagtaggtgtcattctattctggggggtggggtggggcaggacagcaagggggaggattgggaagacaatagcaggcatgctggggatgcggtgggctctatggctctagagcatggctacgtagataagtagcatggcgggttaatcattaactacacctgcaggaggaacccctagtgatggagttggccactccctctctgcgcgctcgctcgctcactgaggccgggcgaccaaaggtcgcccgacgcccgggcggcctcagtgagcgagcgagcgcgcagctgcctgcagg

SEQ ID NO: 459 - DNA, 6252 bp, Artificial Sequence
  Description of Artificial Sequence: Synthetic polynucleotide
cctgcaggcagctgcgcgctcgctcgctcactgaggccgcccgggcaaagcccgggcgtcgggcgacctttggtcgcccggcctcagtgagcgagcgagcgcgcagagagggagtggccaactccatcactaggggttccttgtagttaatgattaacccgccatgctacttatcgcggccgcgggggaggctgctggtgaatattaaccaaggtcaccccagttatcggaggagcaaacaggggctaagtccaccgggggaggctgctggtgaatattaaccaaggtcaccccagttatcggaggagcaaacaggggctaagtccaccgggggaggctgctggtgaatattaaccaaggtcaccccagttatcggaggagcaaacaggggctaagtccacggtacccactgggaggatgttgagtaagatggaaaactactgatgacccttgcagagacagagtattaggacatgtttgaacaggggccgggcgatcagcaggtagcactagaggatccccgtctgtctgcacatttcgtagagcgagtgttccgatactctaatctccctaggcaaggttcatatttgtgtaggttacttattctccttttgttgactaagtcaataatcagaatcagcaggtttggagtcagcttggcagggatcagcagcctgggttggaaggagggggtataaaagccccttcaccaggagaagccgtcacacagatccacaagctcctgaagaggtaagggtttaagggatggttggttggtggggtattaatgtttaattacctggagcacctgcctgaaatcactttttttcaggttgggtttaaaccgcagccaccatgcagattgaactctccacctgtttcttcctgtgcctgctgagattctgcttcagtgccaccaggaggtactacttgggtgcagtggagctctcctgggactacatgcagtcagacctgggagagctccctgtggatgccaggttccctccaagggtccctaaatccttccccttcaacacctcagtggtgtacaagaaaaccctgtttgtggaattcactgaccacctgttcaacattgccaagcccaggccaccctggatggggctcctgggcccaaccatccaagctgaagtgtatgacactgtggtcatcaccctcaagaacatggcctcccaccctgtctccctgcatgctgtgggagtgtcctactggaaggcctcagagggggctgagtatgatgaccagacctcccagagggaaaaggaagatgacaaggtgttcccaggaggatcccacacctatgtgtggcaagtcctgaaggaaaatggtcccatggcatcagaccccttgtgcttgacctactcctacctgagccatgtggacctggtcaaggacctgaactcaggccttattggagccctgcttgtatgcagagagggcagcctggccaaggaaaagacccagaccctgcacaagttcatcctcctgtttgctgtgtttgatgaaggaaagtcctggcactcagagactaagaacagcctgatgcaggacagggatgcagcatcagccagagcctggcccaagatgcacactgtgaatggatatgtgaacaggtccctccctggactaattggatgccacagaaagtctgtgtactggcatgtcattggaatgggcacaacccctgaagtgcatagcatcttcctggaaggacacaccttcctggtcaggaaccacagacaggcatccctggagatctccccaatcaccttcctgactgcccagactctcctgatggacctgggacagttcttgcttttctgccacatctcctcccaccaacatgatggcatggaagcctatgtgaaggtggactcctgccctgaggaacctcaactgaggatgaaaaacaatgaagaagctgaagattatgatgatgacctgactgactcagagatggatgttgtcagatttgatgatgacaacagccctagcttcatccagattagatctgtggccaagaagcaccccaagacctgggtgcactacattgctgctgaggaagaggactgggactatgcccccctggtgctggcccctgatgacagatcctacaagtcccagtacctgaacaatggtccccagagaattgggagaaagtacaagaaagtcagattcatggcctacactgatgaaaccttcaagactagagaagccatccagcatgagtcaggcattctgggtcccctgctgtatggggaagttggtgacaccctgctgatcatcttcaagaaccaagccagcaggccttacaacatctacccccatggaattacagatgtcaggccactgtactccaggagactgcctaagggagtcaagcacctcaaggacttccccatcctgcctggagaaatcttcaagtacaagtggactgtgactgtggaggatgggcctaccaagtcagaccctagatgcctgactaggtactactccagctttgtcaacatggagagagacttggcctcaggactcattggtccactgcttatttgctacaaggagtcagtggaccagagaggaaaccaaatcatgtctgacaagagaaatgtcatcctgttctcagtctttgatgagaacaggtcctggtacctgactgaaaacatccagagattcctgcccaaccctgctggggtgcaactggaggaccctgagttccaggcctcaaacataatgcacagcatcaatggctatgtctttgactccctgcaactgtcagtgtgcttgcatgaagtggcctactggtacatcctctccattggggcccagactgacttcctgtcagtgtttttctctggctacaccttcaagcataaaatggtgtatgaggacaccctcaccctgttccccttctctggagagactgtgttcatgagcatggaaaacccaggcctctggatccttggctgtcacaactcagacttcagaaacaggggcatgactgccctgcttaaggtgtccagctgtgacaagaacactggggactactatgaggactcctatgaggacatcagtgcctaccttctgtccaagaacaatgccattgaacctaggagcttcagccagaactccaggcacccaagcaccaggcagaagcagttcaatgccaccaccatccctgagaacactaccctgcaatcagaccaagaagaaattgactatgatgacaccatctcagtggagatgaagaaggaggactttgacatctatgatgaagatgaaaaccaaagccccagatccttccagaaaaagaccaggcactacttcattgcagcagtggagagattatgggactatgggatgtccagctcccctcatgtgctgagaaacagagcacagtctggctcagtgccccagttcaagaaggtggtgttccaggagttcactgatggttccttcacccaaccattgtacaggggagagctgaatgagcacctgggcctgttgggcccatacatcagagcagaagtggaggacaacatcatggtcaccttcagaaaccaggcctccagaccctactccttctactcctccctgatctcctatgaagaggaccaaagacagggagctgagcccagaaagaactttgtgaagccaaatgaaaccaagacctacttctggaaagtgcagcaccacatggcccccaccaaggatgagtttgactgcaaagcttgggcctacttcagtgatgtggacttggagaaggatgtgcactcaggtcttattggccctctgcttgtgtgccataccaacactcttaaccctgcacatggcagacaagtcactgtgcaggagtttgccctcttcttcaccatctttgatgaaacaaagtcctggtacttcacagaaaacatggaaaggaactgcagagccccttgcaacatccagatggaggaccccaccttcaaggaaaactacaggtttcatgccatcaatgggtacatcatggacaccctgcctggactggtcatggcccaggaccagaggatcagatggtatctgctcagcatgggaagcaatgagaacatccactccattcacttcagtggtcatgtgttcactgtcaggaaaaaggaggagtacaagatggccctctacaacctttaccctggagtgtttgaaactgtggaaatgctgccatccaaggctggcatctggagggtggaatgcctcattggtgaacacctccatgctggaatgtccaccctcttcctggtgtacagcaacaagtgccagacccccctgggaatggcttcagggcacatcagagacttccagatcactgcctctgggcagtatggacagtgggcccctaagctggccaggctccactactctggaagcatcaatgcctggtccactaaggagcccttctcctggatcaaagtggatctgctggcccccatgatcatccatggcattaagacccagggggccagacagaagttctcctccctctacataagccagttcattatcatgtacagcctggatgggaagaagtggcagacctacaggggcaactccactggaaccctgatggtgttctttgggaatgtggacagctcaggcatcaagcacaacatcttcaaccccccaatcattgccagatacatcaggctccaccccacccactacagcatcagatccaccctgagaatggaacttatgggctgtgacctcaactcctgtagcatgcccctgggcatggagtccaaggccatttcagatgcccaaatcactgcatcctcctacttcaccaacatgtttgccacttggagcccttccaaggccagactgcatctgcaaggcagatccaatgcctggaggccccaggtcaacaaccctaaggaatggctccaggtggacttccaaaagactatgaaagtcactggagtgaccacccagggagtgaagtccctgctgacctctatgtatgtgaaggaattcctcatctcctcaagccaagatggacaccagtggaccctgttcttccaaaatggaaaggtcaaagtgttccagggcaaccaggacagcttcacccctgtggtgaactccttggacccccccctgttgaccagatacctgaggatccacccccagtcctgggtccaccagattgccttgagaatggaggtgctgggctgtgaagcccaggacctctactaattaattaagagcatcttaccgccatttattcccatatttgttctgtttttcttgatttgggtatacatttaaatgttaataaaacaaaatggtggggcaatcatttacatttttagggatatgtaattactagttcaggtgtattgccacaagacaaacatgttaagaaactttcccgttatttacgctctgttcctgttaatcaacctctggattacaaaatttgtgaaagattgactgatattcttaactatgttgctccttttacgctgtgtggatatgctgctttatagcctctgtatctagctattgcttcccgtacggctttcgttttctcctccttgtataaatcctggttgctgtctcttttagaggagttgtggcccgttgtccgtcaacgtggcgtggtgtgctctgtgtttgctgacgcaacccccactggctggggcattgccaccacctgtcaactcctttctgggactttcgctttccccctcccgatcgccacggcagaactcatcgccgcctgccttgcccgctgctggacaggggctaggttgctgggcactgataattccgtggtgttgtctgtgccttctagttgccagccatctgttgtttgcccctcccccgtgccttccttgaccctggaaggtgccactcccactgtcctttcctaataaaatgaggaaattgcatcgcattgtctgagtaggtgtcattctattctggggggtggggtggggcaggacagcaagggggaggattgggaagacaatagcaggcatgctggggatgcggtgggctctatggctctagagcatggctacgtagataagtagcatggcgggttaatcattaactacacctgcaggaggaacccctagtgatggagttggccactccctctctgcgcgctcgctcgctcactgaggccgggcgaccaaaggtcgcccgacgcccgggcggcctcagtgagcgagcgagcgcgcagctgcctgcagg

SEQ ID NO: 460 - DNA, 6250 bp, Artificial Sequence
  Description of Artificial Sequence: Synthetic polynucleotide
cctgcaggcagctgcgcgctcgctcgctcactgaggccgcccgggcaaagcccgggcgtcgggcgacctttggtcgcccggcctcagtgagcgagcgagcgcgcagagagggagtggccaactccatcactaggggttccttgtagttaatgattaacccgccatgctacttatcgcggccgcgggggaggctgctggtgaatattaaccaaggtcaccccagttatcggaggagcaaacaggggctaagtccaccgggggaggctgctggtgaatattaaccaaggtcaccccagttatcggaggagcaaacaggggctaagtccaccgggggaggctgctggtgaatattaaccaaggtcaccccagttatcggaggagcaaacaggggctaagtccacggtacccactgggaggatgttgagtaagatggaaaactactgatgacccttgcagagacagagtattaggacatgtttgaacaggggccgggcgatcagcaggtagcactagaggatccccgtctgtctgcacatttcgtagagcgagtgttccgatactctaatctccctaggcaaggttcatatttgtgtaggttacttattctccttttgttgactaagtcaataatcagaatcagcaggtttggagtcagcttggcagggatcagcagcctgggttggaaggagggggtataaaagccccttcaccaggagaagccgtcacacagatccacaagctcctgaagaggtaagggtttaagggatggttggttggtggggtattaatgtttaattacctggagcacctgcctgaaatcactttttttcaggttggtttaaacgccgccaccatgcagattgaactctccacctgtttcttcctgtgcctgctgagattctgcttcagtgccaccaggaggtactacttgggtgcagtggagctctcctgggactacatgcagtcagacctgggagagctccctgtggatgccaggttccctccaagggtccctaaatccttccccttcaacacctcagtggtgtacaagaaaaccctgtttgtggaattcactgaccacctgttcaacattgccaagcccaggccaccctggatggggctcctgggcccaaccatccaagctgaagtgtatgacactgtggtcatcaccctcaagaacatggcctcccaccctgtctccctgcatgctgtgggagtgtcctactggaaggcctcagagggggctgagtatgatgaccagacctcccagagggaaaaggaagatgacaaggtgttcccaggaggatcccacacctatgtgtggcaagtcctgaaggaaaatggtcccatggcatcagaccccttgtgcttgacctactcctacctgagccatgtggacctggtcaaggacctgaactcaggccttattggagccctgcttgtatgcagagagggcagcctggccaaggaaaagacccagaccctgcacaagttcatcctcctgtttgctgtgtttgatgaaggaaagtcctggcactcagagactaagaacagcctgatgcaggacagggatgcagcatcagccagagcctggcccaagatgcacactgtgaatggatatgtgaacaggtccctccctggactaattggatgccacagaaagtctgtgtactggcatgtcattggaatgggcacaacccctgaagtgcatagcatcttcctggaaggacacaccttcctggtcaggaaccacagacaggcatccctggagatctccccaatcaccttcctgactgcccagactctcctgatggacctgggacagttcttgcttttctgccacatctcctcccaccaacatgatggcatggaagcctatgtgaaggtggactcctgccctgaggaacctcaactgaggatgaaaaacaatgaagaagctgaagattatgatgatgacctgactgactcagagatggatgttgtcagatttgatgatgacaacagccctagcttcatccagattagatctgtggccaagaagcaccccaagacctgggtgcactacattgctgctgaggaagaggactgggactatgcccccctggtgctggcccctgatgacagatcctacaagtcccagtacctgaacaatggtccccagagaattgggagaaagtacaagaaagtcagattcatggcctacactgatgaaaccttcaagactagagaagccatccagcatgagtcaggcattctgggtcccctgctgtatggggaagttggtgacaccctgctgatcatcttcaagaaccaagccagcaggccttacaacatctacccccatggaattacagatgtcaggccactgtactccaggagactgcctaagggagtcaagcacctcaaggacttccccatcctgcctggagaaatcttcaagtacaagtggactgtgactgtggaggatgggcctaccaagtcagaccctagatgcctgactaggtactactccagctttgtcaacatggagagagacttggcctcaggactcattggtccactgcttatttgctacaaggagtcagtggaccagagaggaaaccaaatcatgtctgacaagagaaatgtcatcctgttctcagtctttgatgagaacaggtcctggtacctgactgaaaacatccagagattcctgcccaaccctgctggggtgcaactggaggaccctgagttccaggcctcaaacataatgcacagcatcaatggctatgtctttgactccctgcaactgtcagtgtgcttgcatgaagtggcctactggtacatcctctccattggggcccagactgacttcctgtcagtgtttttctctggctacaccttcaagcataaaatggtgtatgaggacaccctcaccctgttccccttctctggagagactgtgttcatgagcatggaaaacccaggcctctggatccttggctgtcacaactcagacttcagaaacaggggcatgactgccctgcttaaggtgtccagctgtgacaagaacactggggactactatgaggactcctatgaggacatcagtgcctaccttctgtccaagaacaatgccattgaacctaggagcttcagccagaactccaggcacccaagcaccaggcagaagcagttcaatgccaccaccatccctgagaacactaccctgcaatcagaccaagaagaaattgactatgatgacaccatctcagtggagatgaagaaggaggactttgacatctatgatgaagatgaaaaccaaagccccagatccttccagaaaaagaccaggcactacttcattgcagcagtggagagattatgggactatgggatgtccagctcccctcatgtgctgagaaacagagcacagtctggctcagtgccccagttcaagaaggtggtgttccaggagttcactgatggttccttcacccaaccattgtacaggggagagctgaatgagcacctgggcctgttgggcccatacatcagagcagaagtggaggacaacatcatggtcaccttcagaaaccaggcctccagaccctactccttctactcctccctgatctcctatgaagaggaccaaagacagggagctgagcccagaaagaactttgtgaagccaaatgaaaccaagacctacttctggaaagtgcagcaccacatggcccccaccaaggatgagtttgactgcaaagcttgggcctacttcagtgatgtggacttggagaaggatgtgcactcaggtcttattggccctctgcttgtgtgccataccaacactcttaaccctgcacatggcagacaagtcactgtgcaggagtttgccctcttcttcaccatctttgatgaaacaaagtcctggtacttcacagaaaacatggaaaggaactgcagagccccttgcaacatccagatggaggaccccaccttcaaggaaaactacaggtttcatgccatcaatgggtacatcatggacaccctgcctggactggtcatggcccaggaccagaggatcagatggtatctgctcagcatgggaagcaatgagaacatccactccattcacttcagtggtcatgtgttcactgtcaggaaaaaggaggagtacaagatggccctctacaacctttaccctggagtgtttgaaactgtggaaatgctgccatccaaggctggcatctggagggtggaatgcctcattggtgaacacctccatgctggaatgtccaccctcttcctggtgtacagcaacaagtgccagacccccctgggaatggcttcagggcacatcagagacttccagatcactgcctctgggcagtatggacagtgggcccctaagctggccaggctccactactctggaagcatcaatgcctggtccactaaggagcccttctcctggatcaaagtggatctgctggcccccatgatcatccatggcattaagacccagggggccagacagaagttctcctccctctacataagccagttcattatcatgtacagcctggatgggaagaagtggcagacctacaggggcaactccactggaaccctgatggtgttctttgggaatgtggacagctcaggcatcaagcacaacatcttcaaccccccaatcattgccagatacatcaggctccaccccacccactacagcatcagatccaccctgagaatggaacttatgggctgtgacctcaactcctgtagcatgcccctgggcatggagtccaaggccatttcagatgcccaaatcactgcatcctcctacttcaccaacatgtttgccacttggagcccttccaaggccagactgcatctgcaaggcagatccaatgcctggaggccccaggtcaacaaccctaaggaatggctccaggtggacttccaaaagactatgaaagtcactggagtgaccacccagggagtgaagtccctgctgacctctatgtatgtgaaggaattcctcatctcctcaagccaagatggacaccagtggaccctgttcttccaaaatggaaaggtcaaagtgttccagggcaaccaggacagcttcacccctgtggtgaactccttggacccccccctgttgaccagatacctgaggatccacccccagtcctgggtccaccagattgccttgagaatggaggtgctgggctgtgaagcccaggacctctactaattaattaagagcatcttaccgccatttattcccatatttgttctgtttttcttgatttgggtatacatttaaatgttaataaaacaaaatggtggggcaatcatttacatttttagggatatgtaattactagttcaggtgtattgccacaagacaaacatgttaagaaactttcccgttatttacgctctgttcctgttaatcaacctctggattacaaaatttgtgaaagattgactgatattcttaactatgttgctccttttacgctgtgtggatatgctgctttatagcctctgtatctagctattgcttcccgtacggctttcgttttctcctccttgtataaatcctggttgctgtctcttttagaggagttgtggcccgttgtccgtcaacgtggcgtggtgtgctctgtgtttgctgacgcaacccccactggctggggcattgccaccacctgtcaactcctttctgggactttcgctttccccctcccgatcgccacggcagaactcatcgccgcctgccttgcccgctgctggacaggggctaggttgctgggcactgataattccgtggtgttgtctgtgccttctagttgccagccatctgttgtttgcccctcccccgtgccttccttgaccctggaaggtgccactcccactgtcctttcctaataaaatgaggaaattgcatcgcattgtctgagtaggtgtcattctattctggggggtggggtggggcaggacagcaagggggaggattgggaagacaatagcaggcatgctggggatgcggtgggctctatggctctagagcatggctacgtagataagtagcatggcgggttaatcattaactacacctgcaggaggaacccctagtgatggagttggccactccctctctgcgcgctcgctcgctcactgaggccgggcgaccaaaggtcgcccgacgcccgggcggcctcagtgagcgagcgagcgcgcagctgcctgcagg

SEQ ID NO: 461 - DNA, 6251 bp, Artificial Sequence
  Description of Artificial Sequence: Synthetic polynucleotide
cctgcaggcagctgcgcgctcgctcgctcactgaggccgcccgggcaaagcccgggcgtcgggcgacctttggtcgcccggcctcagtgagcgagcgagcgcgcagagagggagtggccaactccatcactaggggttccttgtagttaatgattaacccgccatgctacttatcgcggccgcgggggaggctgctggtgaatattaaccaaggtcaccccagttatcggaggagcaaacaggggctaagtccaccgggggaggctgctggtgaatattaaccaaggtcaccccagttatcggaggagcaaacaggggctaagtccaccgggggaggctgctggtgaatattaaccaaggtcaccccagttatcggaggagcaaacaggggctaagtccacggtacccactgggaggatgttgagtaagatggaaaactactgatgacccttgcagagacagagtattaggacatgtttgaacaggggccgggcgatcagcaggtagcactagaggatccccgtctgtctgcacatttcgtagagcgagtgttccgatactctaatctccctaggcaaggttcatatttgtgtaggttacttattctccttttgttgactaagtcaataatcagaatcagcaggtttggagtcagcttggcagggatcagcagcctgggttggaaggagggggtataaaagccccttcaccaggagaagccgtcacacagatccacaagctcctgaagaggtaagggtttaagggatggttggttggtggggtattaatgtttaattacctggagcacctgcctgaaatcactttttttcaggttggtttaaaccgcagccaccatgcagattgaactctccacctgtttcttcctgtgcctgctgagattctgcttcagtgccaccaggaggtactacttgggtgcagtggagctctcctgggactacatgcagtcagacctgggagagctccctgtggatgccaggttccctccaagggtccctaaatccttccccttcaacacctcagtggtgtacaagaaaaccctgtttgtggaattcactgaccacctgttcaacattgccaagcccaggccaccctggatggggctcctgggcccaaccatccaagctgaagtgtatgacactgtggtcatcaccctcaagaacatggcctcccaccctgtctccctgcatgctgtgggagtgtcctactggaaggcctcagagggggctgagtatgatgaccagacctcccagagggaaaaggaagatgacaaggtgttcccaggaggatcccacacctatgtgtggcaagtcctgaaggaaaatggtcccatggcatcagaccccttgtgcttgacctactcctacctgagccatgtggacctggtcaaggacctgaactcaggccttattggagccctgcttgtatgcagagagggcagcctggccaaggaaaagacccagaccctgcacaagttcatcctcctgtttgctgtgtttgatgaaggaaagtcctggcactcagagactaagaacagcctgatgcaggacagggatgcagcatcagccagagcctggcccaagatgcacactgtgaatggatatgtgaacaggtccctccctggactaattggatgccacagaaagtctgtgtactggcatgtcattggaatgggcacaacccctgaagtgcatagcatcttcctggaaggacacaccttcctggtcaggaaccacagacaggcatccctggagatctccccaatcaccttcctgactgcccagactctcctgatggacctgggacagttcttgcttttctgccacatctcctcccaccaacatgatggcatggaagcctatgtgaaggtggactcctgccctgaggaacctcaactgaggatgaaaaacaatgaagaagctgaagattatgatgatgacctgactgactcagagatggatgttgtcagatttgatgatgacaacagccctagcttcatccagattagatctgtggccaagaagcaccccaagacctgggtgcactacattgctgctgaggaagaggactgggactatgcccccctggtgctggcccctgatgacagatcctacaagtcccagtacctgaacaatggtccccagagaattgggagaaagtacaagaaagtcagattcatggcctacactgatgaaaccttcaagactagagaagccatccagcatgagtcaggcattctgggtcccctgctgtatggggaagttggtgacaccctgctgatcatcttcaagaaccaagccagcaggccttacaacatctacccccatggaattacagatgtcaggccactgtactccaggagactgcctaagggagtcaagcacctcaaggacttccccatcctgcctggagaaatcttcaagtacaagtggactgtgactgtggaggatgggcctaccaagtcagaccctagatgcctgactaggtactactccagctttgtcaacatggagagagacttggcctcaggactcattggtccactgcttatttgctacaaggagtcagtggaccagagaggaaaccaaatcatgtctgacaagagaaatgtcatcctgttctcagtctttgatgagaacaggtcctggtacctgactgaaaacatccagagattcctgcccaaccctgctggggtgcaactggaggaccctgagttccaggcctcaaacataatgcacagcatcaatggctatgtctttgactccctgcaactgtcagtgtgcttgcatgaagtggcctactggtacatcctctccattggggcccagactgacttcctgtcagtgtttttctctggctacaccttcaagcataaaatggtgtatgaggacaccctcaccctgttccccttctctggagagactgtgttcatgagcatggaaaacccaggcctctggatccttggctgtcacaactcagacttcagaaacaggggcatgactgccctgcttaaggtgtccagctgtgacaagaacactggggactactatgaggactcctatgaggacatcagtgcctaccttctgtccaagaacaatgccattgaacctaggagcttcagccagaactccaggcacccaagcaccaggcagaagcagttcaatgccaccaccatccctgagaacactaccctgcaatcagaccaagaagaaattgactatgatgacaccatctcagtggagatgaagaaggaggactttgacatctatgatgaagatgaaaaccaaagccccagatccttccagaaaaagaccaggcactacttcattgcagcagtggagagattatgggactatgggatgtccagctcccctcatgtgctgagaaacagagcacagtctggctcagtgccccagttcaagaaggtggtgttccaggagttcactgatggttccttcacccaaccattgtacaggggagagctgaatgagcacctgggcctgttgggcccatacatcagagcagaagtggaggacaacatcatggtcaccttcagaaaccaggcctccagaccctactccttctactcctccctgatctcctatgaagaggaccaaagacagggagctgagcccagaaagaactttgtgaagccaaatgaaaccaagacctacttctggaaagtgcagcaccacatggcccccaccaaggatgagtttgactgcaaagcttgggcctacttcagtgatgtggacttggagaaggatgtgcactcaggtcttattggccctctgcttgtgtgccataccaacactcttaaccctgcacatggcagacaagtcactgtgcaggagtttgccctcttcttcaccatctttgatgaaacaaagtcctggtacttcacagaaaacatggaaaggaactgcagagccccttgcaacatccagatggaggaccccaccttcaaggaaaactacaggtttcatgccatcaatgggtacatcatggacaccctgcctggactggtcatggcccaggaccagaggatcagatggtatctgctcagcatgggaagcaatgagaacatccactccattcacttcagtggtcatgtgttcactgtcaggaaaaaggaggagtacaagatggccctctacaacctttaccctggagtgtttgaaactgtggaaatgctgccatccaaggctggcatctggagggtggaatgcctcattggtgaacacctccatgctggaatgtccaccctcttcctggtgtacagcaacaagtgccagacccccctgggaatggcttcagggcacatcagagacttccagatcactgcctctgggcagtatggacagtgggcccctaagctggccaggctccactactctggaagcatcaatgcctggtccactaaggagcccttctcctggatcaaagtggatctgctggcccccatgatcatccatggcattaagacccagggggccagacagaagttctcctccctctacataagccagttcattatcatgtacagcctggatgggaagaagtggcagacctacaggggcaactccactggaaccctgatggtgttctttgggaatgtggacagctcaggcatcaagcacaacatcttcaaccccccaatcattgccagatacatcaggctccaccccacccactacagcatcagatccaccctgagaatggaacttatgggctgtgacctcaactcctgtagcatgcccctgggcatggagtccaaggccatttcagatgcccaaatcactgcatcctcctacttcaccaacatgtttgccacttggagcccttccaaggccagactgcatctgcaaggcagatccaatgcctggaggccccaggtcaacaaccctaaggaatggctccaggtggacttccaaaagactatgaaagtcactggagtgaccacccagggagtgaagtccctgctgacctctatgtatgtgaaggaattcctcatctcctcaagccaagatggacaccagtggaccctgttcttccaaaatggaaaggtcaaagtgttccagggcaaccaggacagcttcacccctgtggtgaactccttggacccccccctgttgaccagatacctgaggatccacccccagtcctgggtccaccagattgccttgagaatggaggtgctgggctgtgaagcccaggacctctactaattaattaagagcatcttaccgccatttattcccatatttgttctgtttttcttgatttgggtatacatttaaatgttaataaaacaaaatggtggggcaatcatttacatttttagggatatgtaattactagttcaggtgtattgccacaagacaaacatgttaagaaactttcccgttatttacgctctgttcctgttaatcaacctctggattacaaaatttgtgaaagattgactgatattcttaactatgttgctccttttacgctgtgtggatatgctgctttatagcctctgtatctagctattgcttcccgtacggctttcgttttctcctccttgtataaatcctggttgctgtctcttttagaggagttgtggcccgttgtccgtcaacgtggcgtggtgtgctctgtgtttgctgacgcaacccccactggctggggcattgccaccacctgtcaactcctttctgggactttcgctttccccctcccgatcgccacggcagaactcatcgccgcctgccttgcccgctgctggacaggggctaggttgctgggcactgataattccgtggtgttgtctgtgccttctagttgccagccatctgttgtttgcccctcccccgtgccttccttgaccctggaaggtgccactcccactgtcctttcctaataaaatgaggaaattgcatcgcattgtctgagtaggtgtcattctattctggggggtggggtggggcaggacagcaagggggaggattgggaagacaatagcaggcatgctggggatgcggtgggctctatggctctagagcatggctacgtagataagtagcatggcgggttaatcattaactacacctgcaggaggaacccctagtgatggagttggccactccctctctgcgcgctcgctcgctcactgaggccgggcgaccaaaggtcgcccgacgcccgggcggcctcagtgagcgagcgagcgcgcagctgcctgcagg

SEQ ID NO: 462 - DNA, 6147 bp, Artificial Sequence
  Description of Artificial Sequence: Synthetic polynucleotide
cctgcaggcagctgcgcgctcgctcgctcactgaggccgcccgggcaaagcccgggcgtcgggcgacctttggtcgcccggcctcagtgagcgagcgagcgcgcagagagggagtggccaactccatcactaggggttccttgtagttaatgattaacccgccatgctacttatcgcggccgcgttaatcattaacgcttgtactttggtacagttaatcattaacgcttgtactttggtacagttaatcattaacgcttgtactttggtacaatcgatgcgagaacttgtgcctccccgtgttcctgctctttgtccctctgtcctacttagactaatatttgccttgggtactgcaaacaggaaatgggggagggacaggagtagggcggagggtagttaagaatgtggatccccgtctgtctgcacatttcgtagagcgagtgttccgatactctaatctccctaggcaaggttcatatttgtgtaggttacttattctccttttgttgactaagtcaataatcagaatcagcaggtttggagtcagcttggcagggatcagcagcctgggttggaaggagggggtataaaagccccttcaccaggagaagccgtcacacagatccacaagctcctgaagaggtaagggtttaagggatggttggttggtggggtattaatgtttaattacctggagcacctgcctgaaatcactttttttcaggttgggtttaaaccgcagccaccatgcagattgaactctccacctgtttcttcctgtgcctgctgagattctgcttcagtgccaccaggaggtactacttgggtgcagtggagctctcctgggactacatgcagtcagacctgggagagctccctgtggatgccaggttccctccaagggtccctaaatccttccccttcaacacctcagtggtgtacaagaaaaccctgtttgtggaattcactgaccacctgttcaacattgccaagcccaggccaccctggatggggctcctgggcccaaccatccaagctgaagtgtatgacactgtggtcatcaccctcaagaacatggcctcccaccctgtctccctgcatgctgtgggagtgtcctactggaaggcctcagagggggctgagtatgatgaccagacctcccagagggaaaaggaagatgacaaggtgttcccaggaggatcccacacctatgtgtggcaagtcctgaaggaaaatggtcccatggcatcagaccccttgtgcttgacctactcctacctgagccatgtggacctggtcaaggacctgaactcaggccttattggagccctgcttgtatgcagagagggcagcctggccaaggaaaagacccagaccctgcacaagttcatcctcctgtttgctgtgtttgatgaaggaaagtcctggcactcagagactaagaacagcctgatgcaggacagggatgcagcatcagccagagcctggcccaagatgcacactgtgaatggatatgtgaacaggtccctccctggactaattggatgccacagaaagtctgtgtactggcatgtcattggaatgggcacaacccctgaagtgcatagcatcttcctggaaggacacaccttcctggtcaggaaccacagacaggcatccctggagatctccccaatcaccttcctgactgcccagactctcctgatggacctgggacagttcttgcttttctgccacatctcctcccaccaacatgatggcatggaagcctatgtgaaggtggactcctgccctgaggaacctcaactgaggatgaaaaacaatgaagaagctgaagattatgatgatgacctgactgactcagagatggatgttgtcagatttgatgatgacaacagccctagcttcatccagattagatctgtggccaagaagcaccccaagacctgggtgcactacattgctgctgaggaagaggactgggactatgcccccctggtgctggcccctgatgacagatcctacaagtcccagtacctgaacaatggtccccagagaattgggagaaagtacaagaaagtcagattcatggcctacactgatgaaaccttcaagactagagaagccatccagcatgagtcaggcattctgggtcccctgctgtatggggaagttggtgacaccctgctgatcatcttcaagaaccaagccagcaggccttacaacatctacccccatggaattacagatgtcaggccactgtactccaggagactgcctaagggagtcaagcacctcaaggacttccccatcctgcctggagaaatcttcaagtacaagtggactgtgactgtggaggatgggcctaccaagtcagaccctagatgcctgactaggtactactccagctttgtcaacatggagagagacttggcctcaggactcattggtccactgcttatttgctacaaggagtcagtggaccagagaggaaaccaaatcatgtctgacaagagaaatgtcatcctgttctcagtctttgatgagaacaggtcctggtacctgactgaaaacatccagagattcctgcccaaccctgctggggtgcaactggaggaccctgagttccaggcctcaaacataatgcacagcatcaatggctatgtctttgactccctgcaactgtcagtgtgcttgcatgaagtggcctactggtacatcctctccattggggcccagactgacttcctgtcagtgtttttctctggctacaccttcaagcataaaatggtgtatgaggacaccctcaccctgttccccttctctggagagactgtgttcatgagcatggaaaacccaggcctctggatccttggctgtcacaactcagacttcagaaacaggggcatgactgccctgcttaaggtgtccagctgtgacaagaacactggggactactatgaggactcctatgaggacatcagtgcctaccttctgtccaagaacaatgccattgaacctaggagcttcagccagaactccaggcacccaagcaccaggcagaagcagttcaatgccaccaccatccctgagaacactaccctgcaatcagaccaagaagaaattgactatgatgacaccatctcagtggagatgaagaaggaggactttgacatctatgatgaagatgaaaaccaaagccccagatccttccagaaaaagaccaggcactacttcattgcagcagtggagagattatgggactatgggatgtccagctcccctcatgtgctgagaaacagagcacagtctggctcagtgccccagttcaagaaggtggtgttccaggagttcactgatggttccttcacccaaccattgtacaggggagagctgaatgagcacctgggcctgttgggcccatacatcagagcagaagtggaggacaacatcatggtcaccttcagaaaccaggcctccagaccctactccttctactcctccctgatctcctatgaagaggaccaaagacagggagctgagcccagaaagaactttgtgaagccaaatgaaaccaagacctacttctggaaagtgcagcaccacatggcccccaccaaggatgagtttgactgcaaagcttgggcctacttcagtgatgtggacttggagaaggatgtgcactcaggtcttattggccctctgcttgtgtgccataccaacactcttaaccctgcacatggcagacaagtcactgtgcaggagtttgccctcttcttcaccatctttgatgaaacaaagtcctggtacttcacagaaaacatggaaaggaactgcagagccccttgcaacatccagatggaggaccccaccttcaaggaaaactacaggtttcatgccatcaatgggtacatcatggacaccctgcctggactggtcatggcccaggaccagaggatcagatggtatctgctcagcatgggaagcaatgagaacatccactccattcacttcagtggtcatgtgttcactgtcaggaaaaaggaggagtacaagatggccctctacaacctttaccctggagtgtttgaaactgtggaaatgctgccatccaaggctggcatctggagggtggaatgcctcattggtgaacacctccatgctggaatgtccaccctcttcctggtgtacagcaacaagtgccagacccccctgggaatggcttcagggcacatcagagacttccagatcactgcctctgggcagtatggacagtgggcccctaagctggccaggctccactactctggaagcatcaatgcctggtccactaaggagcccttctcctggatcaaagtggatctgctggcccccatgatcatccatggcattaagacccagggggccagacagaagttctcctccctctacataagccagttcattatcatgtacagcctggatgggaagaagtggcagacctacaggggcaactccactggaaccctgatggtgttctttgggaatgtggacagctcaggcatcaagcacaacatcttcaaccccccaatcattgccagatacatcaggctccaccccacccactacagcatcagatccaccctgagaatggaacttatgggctgtgacctcaactcctgtagcatgcccctgggcatggagtccaaggccatttcagatgcccaaatcactgcatcctcctacttcaccaacatgtttgccacttggagcccttccaaggccagactgcatctgcaaggcagatccaatgcctggaggccccaggtcaacaaccctaaggaatggctccaggtggacttccaaaagactatgaaagtcactggagtgaccacccagggagtgaagtccctgctgacctctatgtatgtgaaggaattcctcatctcctcaagccaagatggacaccagtggaccctgttcttccaaaatggaaaggtcaaagtgttccagggcaaccaggacagcttcacccctgtggtgaactccttggacccccccctgttgaccagatacctgaggatccacccccagtcctgggtccaccagattgccttgagaatggaggtgctgggctgtgaagcccaggacctctactaattaattaagagcatcttaccgccatttattcccatatttgttctgtttttcttgatttgggtatacatttaaatgttaataaaacaaaatggtggggcaatcatttacatttttagggatatgtaattactagttcaggtgtattgccacaagacaaacatgttaagaaactttcccgttatttacgctctgttcctgttaatcaacctctggattacaaaatttgtgaaagattgactgatattcttaactatgttgctccttttacgctgtgtggatatgctgctttatagcctctgtatctagctattgcttcccgtacggctttcgttttctcctccttgtataaatcctggttgctgtctcttttagaggagttgtggcccgttgtccgtcaacgtggcgtggtgtgctctgtgtttgctgacgcaacccccactggctggggcattgccaccacctgtcaactcctttctgggactttcgctttccccctcccgatcgccacggcagaactcatcgccgcctgccttgcccgctgctggacaggggctaggttgctgggcactgataattccgtggtgttgtctgtgccttctagttgccagccatctgttgtttgcccctcccccgtgccttccttgaccctggaaggtgccactcccactgtcctttcctaataaaatgaggaaattgcatcgcattgtctgagtaggtgtcattctattctggggggtggggtggggcaggacagcaagggggaggattgggaagacaatagcaggcatgctggggatgcggtgggctctatggctctagagcatggctacgtagataagtagcatggcgggttaatcattaactacacctgcaggaggaacccctagtgatggagttggccactccctctctgcgcgctcgctcgctcactgaggccgggcgaccaaaggtcgcccgacgcccgggcggcctcagtgagcgagcgagcgcgcagctgcctgcagg

SEQ ID NO: 463 - DNA, 6146 bp, Artificial Sequence
  Description of Artificial Sequence: Synthetic polynucleotide
cctgcaggcagctgcgcgctcgctcgctcactgaggccgcccgggcaaagcccgggcgtcgggcgacctttggtcgcccggcctcagtgagcgagcgagcgcgcagagagggagtggccaactccatcactaggggttccttgtagttaatgattaacccgccatgctacttatcgcggccgcgttaatcattaacgcttgtactttggtacagttaatcattaacgcttgtactttggtacagttaatcattaacgcttgtactttggtacaatcgatgcgagaacttgtgcctccccgtgttcctgctctttgtccctctgtcctacttagactaatatttgccttgggtactgcaaacaggaaatgggggagggacaggagtagggcggagggtagttaagaatgtggatccccgtctgtctgcacatttcgtagagcgagtgttccgatactctaatctccctaggcaaggttcatatttgtgtaggttacttattctccttttgttgactaagtcaataatcagaatcagcaggtttggagtcagcttggcagggatcagcagcctgggttggaaggagggggtataaaagccccttcaccaggagaagccgtcacacagatccacaagctcctgaagaggtaagggtttaagggatggttggttggtggggtattaatgtttaattacctggagcacctgcctgaaatcactttttttcaggttgggtttaaacgccgccaccatgcagattgaactctccacctgtttcttcctgtgcctgctgagattctgcttcagtgccaccaggaggtactacttgggtgcagtggagctctcctgggactacatgcagtcagacctgggagagctccctgtggatgccaggttccctccaagggtccctaaatccttccccttcaacacctcagtggtgtacaagaaaaccctgtttgtggaattcactgaccacctgttcaacattgccaagcccaggccaccctggatggggctcctgggcccaaccatccaagctgaagtgtatgacactgtggtcatcaccctcaagaacatggcctcccaccctgtctccctgcatgctgtgggagtgtcctactggaaggcctcagagggggctgagtatgatgaccagacctcccagagggaaaaggaagatgacaaggtgttcccaggaggatcccacacctatgtgtggcaagtcctgaaggaaaatggtcccatggcatcagaccccttgtgcttgacctactcctacctgagccatgtggacctggtcaaggacctgaactcaggccttattggagccctgcttgtatgcagagagggcagcctggccaaggaaaagacccagaccctgcacaagttcatcctcctgtttgctgtgtttgatgaaggaaagtcctggcactcagagactaagaacagcctgatgcaggacagggatgcagcatcagccagagcctggcccaagatgcacactgtgaatggatatgtgaacaggtccctccctggactaattggatgccacagaaagtctgtgtactggcatgtcattggaatgggcacaacccctgaagtgcatagcatcttcctggaaggacacaccttcctggtcaggaaccacagacaggcatccctggagatctccccaatcaccttcctgactgcccagactctcctgatggacctgggacagttcttgcttttctgccacatctcctcccaccaacatgatggcatggaagcctatgtgaaggtggactcctgccctgaggaacctcaactgaggatgaaaaacaatgaagaagctgaagattatgatgatgacctgactgactcagagatggatgttgtcagatttgatgatgacaacagccctagcttcatccagattagatctgtggccaagaagcaccccaagacctgggtgcactacattgctgctgaggaagaggactgggactatgcccccctggtgctggcccctgatgacagatcctacaagtcccagtacctgaacaatggtccccagagaattgggagaaagtacaagaaagtcagattcatggcctacactgatgaaaccttcaagactagagaagccatccagcatgagtcaggcattctgggtcccctgctgtatggggaagttggtgacaccctgctgatcatcttcaagaaccaagccagcaggccttacaacatctacccccatggaattacagatgtcaggccactgtactccaggagactgcctaagggagtcaagcacctcaaggacttccccatcctgcctggagaaatcttcaagtacaagtggactgtgactgtggaggatgggcctaccaagtcagaccctagatgcctgactaggtactactccagctttgtcaacatggagagagacttggcctcaggactcattggtccactgcttatttgctacaaggagtcagtggaccagagaggaaaccaaatcatgtctgacaagagaaatgtcatcctgttctcagtctttgatgagaacaggtcctggtacctgactgaaaacatccagagattcctgcccaaccctgctggggtgcaactggaggaccctgagttccaggcctcaaacataatgcacagcatcaatggctatgtctttgactccctgcaactgtcagtgtgcttgcatgaagtggcctactggtacatcctctccattggggcccagactgacttcctgtcagtgtttttctctggctacaccttcaagcataaaatggtgtatgaggacaccctcaccctgttccccttctctggagagactgtgttcatgagcatggaaaacccaggcctctggatccttggctgtcacaactcagacttcagaaacaggggcatgactgccctgcttaaggtgtccagctgtgacaagaacactggggactactatgaggactcctatgaggacatcagtgcctaccttctgtccaagaacaatgccattgaacctaggagcttcagccagaactccaggcacccaagcaccaggcagaagcagttcaatgccaccaccatccctgagaacactaccctgcaatcagaccaagaagaaattgactatgatgacaccatctcagtggagatgaagaaggaggactttgacatctatgatgaagatgaaaaccaaagccccagatccttccagaaaaagaccaggcactacttcattgcagcagtggagagattatgggactatgggatgtccagctcccctcatgtgctgagaaacagagcacagtctggctcagtgccccagttcaagaaggtggtgttccaggagttcactgatggttccttcacccaaccattgtacaggggagagctgaatgagcacctgggcctgttgggcccatacatcagagcagaagtggaggacaacatcatggtcaccttcagaaaccaggcctccagaccctactccttctactcctccctgatctcctatgaagaggaccaaagacagggagctgagcccagaaagaactttgtgaagccaaatgaaaccaagacctacttctggaaagtgcagcaccacatggcccccaccaaggatgagtttgactgcaaagcttgggcctacttcagtgatgtggacttggagaaggatgtgcactcaggtcttattggccctctgcttgtgtgccataccaacactcttaaccctgcacatggcagacaagtcactgtgcaggagtttgccctcttcttcaccatctttgatgaaacaaagtcctggtacttcacagaaaacatggaaaggaactgcagagccccttgcaacatccagatggaggaccccaccttcaaggaaaactacaggtttcatgccatcaatgggtacatcatggacaccctgcctggactggtcatggcccaggaccagaggatcagatggtatctgctcagcatgggaagcaatgagaacatccactccattcacttcagtggtcatgtgttcactgtcaggaaaaaggaggagtacaagatggccctctacaacctttaccctggagtgtttgaaactgtggaaatgctgccatccaaggctggcatctggagggtggaatgcctcattggtgaacacctccatgctggaatgtccaccctcttcctggtgtacagcaacaagtgccagacccccctgggaatggcttcagggcacatcagagacttccagatcactgcctctgggcagtatggacagtgggcccctaagctggccaggctccactactctggaagcatcaatgcctggtccactaaggagcccttctcctggatcaaagtggatctgctggcccccatgatcatccatggcattaagacccagggggccagacagaagttctcctccctctacataagccagttcattatcatgtacagcctggatgggaagaagtggcagacctacaggggcaactccactggaaccctgatggtgttctttgggaatgtggacagctcaggcatcaagcacaacatcttcaaccccccaatcattgccagatacatcaggctccaccccacccactacagcatcagatccaccctgagaatggaacttatgggctgtgacctcaactcctgtagcatgcccctgggcatggagtccaaggccatttcagatgcccaaatcactgcatcctcctacttcaccaacatgtttgccacttggagcccttccaaggccagactgcatctgcaaggcagatccaatgcctggaggccccaggtcaacaaccctaaggaatggctccaggtggacttccaaaagactatgaaagtcactggagtgaccacccagggagtgaagtccctgctgacctctatgtatgtgaaggaattcctcatctcctcaagccaagatggacaccagtggaccctgttcttccaaaatggaaaggtcaaagtgttccagggcaaccaggacagcttcacccctgtggtgaactccttggacccccccctgttgaccagatacctgaggatccacccccagtcctgggtccaccagattgccttgagaatggaggtgctgggctgtgaagcccaggacctctactaattaattaagagcatcttaccgccatttattcccatatttgttctgtttttcttgatttgggtatacatttaaatgttaataaaacaaaatggtggggcaatcatttacatttttagggatatgtaattactagttcaggtgtattgccacaagacaaacatgttaagaaactttcccgttatttacgctctgttcctgttaatcaacctctggattacaaaatttgtgaaagattgactgatattcttaactatgttgctccttttacgctgtgtggatatgctgctttatagcctctgtatctagctattgcttcccgtacggctttcgttttctcctccttgtataaatcctggttgctgtctcttttagaggagttgtggcccgttgtccgtcaacgtggcgtggtgtgctctgtgtttgctgacgcaacccccactggctggggcattgccaccacctgtcaactcctttctgggactttcgctttccccctcccgatcgccacggcagaactcatcgccgcctgccttgcccgctgctggacaggggctaggttgctgggcactgataattccgtggtgttgtctgtgccttctagttgccagccatctgttgtttgcccctcccccgtgccttccttgaccctggaaggtgccactcccactgtcctttcctaataaaatgaggaaattgcatcgcattgtctgagtaggtgtcattctattctggggggtggggtggggcaggacagcaagggggaggattgggaagacaatagcaggcatgctggggatgcggtgggctctatggctctagagcatggctacgtagataagtagcatggcgggttaatcattaactacacctgcaggaggaacccctagtgatggagttggccactccctctctgcgcgctcgctcgctcactgaggccgggcgaccaaaggtcgcccgacgcccgggcggcctcagtgagcgagcgagcgcgcagctgcctgcagg

SEQ ID NO: 464 - DNA, 6484 bp, Artificial Sequence
  Description of Artificial Sequence: Synthetic polynucleotide
cctgcaggcagctgcgcgctcgctcgctcactgaggccgcccgggcaaagcccgggcgtcgggcgacctttggtcgcccggcctcagtgagcgagcgagcgcgcagagagggagtggccaactccatcactaggggttccttgtagttaatgattaacccgccatgctacttatcgcggccgcgttaatcattaacgcttgtactttggtacagttaatcattaacgcttgtactttggtacagttaatcattaacgcttgtactttggtacaatcgatgcgagaacttgtgcctccccgtgttcctgctctttgtccctctgtcctacttagactaatatttgccttgggtactgcaaacaggaaatgggggagggacaggagtagggcggagggtagttaagaatgtcaattggggggaggctgctggtgaatattaaccaaggtcaccccagttatcggaggagcaaacaggggctaagtccaccgggggaggctgctggtgaatattaaccaaggtcaccccagttatcggaggagcaaacaggggctaagtccaccgggggaggctgctggtgaatattaaccaaggtcaccccagttatcggaggagcaaacaggggctaagtccacggtacccactgggaggatgttgagtaagatggaaaactactgatgacccttgcagagacagagtattaggacatgtttgaacaggggccgggcgatcagcaggtagcactagaggatccccgtctgtctgcacatttcgtagagcgagtgttccgatactctaatctccctaggcaaggttcatatttgtgtaggttacttattctccttttgttgactaagtcaataatcagaatcagcaggtttggagtcagcttggcagggatcagcagcctgggttggaaggagggggtataaaagccccttcaccaggagaagccgtcacacagatccacaagctcctgaagaggtaagggtttaagggatggttggttggtggggtattaatgtttaattacctggagcacctgcctgaaatcactttttttcaggttgggtttaaaccgcagccaccatgcagattgaactctccacctgtttcttcctgtgcctgctgagattctgcttcagtgccaccaggaggtactacttgggtgcagtggagctctcctgggactacatgcagtcagacctgggagagctccctgtggatgccaggttccctccaagggtccctaaatccttccccttcaacacctcagtggtgtacaagaaaaccctgtttgtggaattcactgaccacctgttcaacattgccaagcccaggccaccctggatggggctcctgggcccaaccatccaagctgaagtgtatgacactgtggtcatcaccctcaagaacatggcctcccaccctgtctccctgcatgctgtgggagtgtcctactggaaggcctcagagggggctgagtatgatgaccagacctcccagagggaaaaggaagatgacaaggtgttcccaggaggatcccacacctatgtgtggcaagtcctgaaggaaaatggtcccatggcatcagaccccttgtgcttgacctactcctacctgagccatgtggacctggtcaaggacctgaactcaggccttattggagccctgcttgtatgcagagagggcagcctggccaaggaaaagacccagaccctgcacaagttcatcctcctgtttgctgtgtttgatgaaggaaagtcctggcactcagagactaagaacagcctgatgcaggacagggatgcagcatcagccagagcctggcccaagatgcacactgtgaatggatatgtgaacaggtccctccctggactaattggatgccacagaaagtctgtgtactggcatgtcattggaatgggcacaacccctgaagtgcatagcatcttcctggaaggacacaccttcctggtcaggaaccacagacaggcatccctggagatctccccaatcaccttcctgactgcccagactctcctgatggacctgggacagttcttgcttttctgccacatctcctcccaccaacatgatggcatggaagcctatgtgaaggtggactcctgccctgaggaacctcaactgaggatgaaaaacaatgaagaagctgaagattatgatgatgacctgactgactcagagatggatgttgtcagatttgatgatgacaacagccctagcttcatccagattagatctgtggccaagaagcaccccaagacctgggtgcactacattgctgctgaggaagaggactgggactatgcccccctggtgctggcccctgatgacagatcctacaagtcccagtacctgaacaatggtccccagagaattgggagaaagtacaagaaagtcagattcatggcctacactgatgaaaccttcaagactagagaagccatccagcatgagtcaggcattctgggtcccctgctgtatggggaagttggtgacaccctgctgatcatcttcaagaaccaagccagcaggccttacaacatctacccccatggaattacagatgtcaggccactgtactccaggagactgcctaagggagtcaagcacctcaaggacttccccatcctgcctggagaaatcttcaagtacaagtggactgtgactgtggaggatgggcctaccaagtcagaccctagatgcctgactaggtactactccagctttgtcaacatggagagagacttggcctcaggactcattggtccactgcttatttgctacaaggagtcagtggaccagagaggaaaccaaatcatgtctgacaagagaaatgtcatcctgttctcagtctttgatgagaacaggtcctggtacctgactgaaaacatccagagattcctgcccaaccctgctggggtgcaactggaggaccctgagttccaggcctcaaacataatgcacagcatcaatggctatgtctttgactccctgcaactgtcagtgtgcttgcatgaagtggcctactggtacatcctctccattggggcccagactgacttcctgtcagtgtttttctctggctacaccttcaagcataaaatggtgtatgaggacaccctcaccctgttccccttctctggagagactgtgttcatgagcatggaaaacccaggcctctggatccttggctgtcacaactcagacttcagaaacaggggcatgactgccctgcttaaggtgtccagctgtgacaagaacactggggactactatgaggactcctatgaggacatcagtgcctaccttctgtccaagaacaatgccattgaacctaggagcttcagccagaactccaggcacccaagcaccaggcagaagcagttcaatgccaccaccatccctgagaacactaccctgcaatcagaccaagaagaaattgactatgatgacaccatctcagtggagatgaagaaggaggactttgacatctatgatgaagatgaaaaccaaagccccagatccttccagaaaaagaccaggcactacttcattgcagcagtggagagattatgggactatgggatgtccagctcccctcatgtgctgagaaacagagcacagtctggctcagtgccccagttcaagaaggtggtgttccaggagttcactgatggttccttcacccaaccattgtacaggggagagctgaatgagcacctgggcctgttgggcccatacatcagagcagaagtggaggacaacatcatggtcaccttcagaaaccaggcctccagaccctactccttctactcctccctgatctcctatgaagaggaccaaagacagggagctgagcccagaaagaactttgtgaagccaaatgaaaccaagacctacttctggaaagtgcagcaccacatggcccccaccaaggatgagtttgactgcaaagcttgggcctacttcagtgatgtggacttggagaaggatgtgcactcaggtcttattggccctctgcttgtgtgccataccaacactcttaaccctgcacatggcagacaagtcactgtgcaggagtttgccctcttcttcaccatctttgatgaaacaaagtcctggtacttcacagaaaacatggaaaggaactgcagagccccttgcaacatccagatggaggaccccaccttcaaggaaaactacaggtttcatgccatcaatgggtacatcatggacaccctgcctggactggtcatggcccaggaccagaggatcagatggtatctgctcagcatgggaagcaatgagaacatccactccattcacttcagtggtcatgtgttcactgtcaggaaaaaggaggagtacaagatggccctctacaacctttaccctggagtgtttgaaactgtggaaatgctgccatccaaggctggcatctggagggtggaatgcctcattggtgaacacctccatgctggaatgtccaccctcttcctggtgtacagcaacaagtgccagacccccctgggaatggcttcagggcacatcagagacttccagatcactgcctctgggcagtatggacagtgggcccctaagctggccaggctccactactctggaagcatcaatgcctggtccactaaggagcccttctcctggatcaaagtggatctgctggcccccatgatcatccatggcattaagacccagggggccagacagaagttctcctccctctacataagccagttcattatcatgtacagcctggatgggaagaagtggcagacctacaggggcaactccactggaaccctgatggtgttctttgggaatgtggacagctcaggcatcaagcacaacatcttcaaccccccaatcattgccagatacatcaggctccaccccacccactacagcatcagatccaccctgagaatggaacttatgggctgtgacctcaactcctgtagcatgcccctgggcatggagtccaaggccatttcagatgcccaaatcactgcatcctcctacttcaccaacatgtttgccacttggagcccttccaaggccagactgcatctgcaaggcagatccaatgcctggaggccccaggtcaacaaccctaaggaatggctccaggtggacttccaaaagactatgaaagtcactggagtgaccacccagggagtgaagtccctgctgacctctatgtatgtgaaggaattcctcatctcctcaagccaagatggacaccagtggaccctgttcttccaaaatggaaaggtcaaagtgttccagggcaaccaggacagcttcacccctgtggtgaactccttggacccccccctgttgaccagatacctgaggatccacccccagtcctgggtccaccagattgccttgagaatggaggtgctgggctgtgaagcccaggacctctactaattaattaagagcatcttaccgccatttattcccatatttgttctgtttttcttgatttgggtatacatttaaatgttaataaaacaaaatggtggggcaatcatttacatttttagggatatgtaattactagttcaggtgtattgccacaagacaaacatgttaagaaactttcccgttatttacgctctgttcctgttaatcaacctctggattacaaaatttgtgaaagattgactgatattcttaactatgttgctccttttacgctgtgtggatatgctgctttatagcctctgtatctagctattgcttcccgtacggctttcgttttctcctccttgtataaatcctggttgctgtctcttttagaggagttgtggcccgttgtccgtcaacgtggcgtggtgtgctctgtgtttgctgacgcaacccccactggctggggcattgccaccacctgtcaactcctttctgggactttcgctttccccctcccgatcgccacggcagaactcatcgccgcctgccttgcccgctgctggacaggggctaggttgctgggcactgataattccgtggtgttgtctgtgccttctagttgccagccatctgttgtttgcccctcccccgtgccttccttgaccctggaaggtgccactcccactgtcctttcctaataaaatgaggaaattgcatcgcattgtctgagtaggtgtcattctattctggggggtggggtggggcaggacagcaagggggaggattgggaagacaatagcaggcatgctggggatgcggtgggctctatggctctagagcatggctacgtagataagtagcatggcgggttaatcattaactacacctgcaggaggaacccctagtgatggagttggccactccctctctgcgcgctcgctcgctcactgaggccgggcgaccaaaggtcgcccgacgcccgggcggcctcagtgagcgagcgagcgcgcagctgcctgcagg

SEQ ID NO: 465 - DNA, 6483 bp, Artificial Sequence
  Description of Artificial Sequence: Synthetic polynucleotide
cctgcaggcagctgcgcgctcgctcgctcactgaggccgcccgggcaaagcccgggcgtcgggcgacctttggtcgcccggcctcagtgagcgagcgagcgcgcagagagggagtggccaactccatcactaggggttccttgtagttaatgattaacccgccatgctacttatcgcggccgcgttaatcattaacgcttgtactttggtacagttaatcattaacgcttgtactttggtacagttaatcattaacgcttgtactttggtacaatcgatgcgagaacttgtgcctccccgtgttcctgctctttgtccctctgtcctacttagactaatatttgccttgggtactgcaaacaggaaatgggggagggacaggagtagggcggagggtagttaagaatgtcaattggggggaggctgctggtgaatattaaccaaggtcaccccagttatcggaggagcaaacaggggctaagtccaccgggggaggctgctggtgaatattaaccaaggtcaccccagttatcggaggagcaaacaggggctaagtccaccgggggaggctgctggtgaatattaaccaaggtcaccccagttatcggaggagcaaacaggggctaagtccacggtacccactgggaggatgttgagtaagatggaaaactactgatgacccttgcagagacagagtattaggacatgtttgaacaggggccgggcgatcagcaggtagcactagaggatccccgtctgtctgcacatttcgtagagcgagtgttccgatactctaatctccctaggcaaggttcatatttgtgtaggttacttattctccttttgttgactaagtcaataatcagaatcagcaggtttggagtcagcttggcagggatcagcagcctgggttggaaggagggggtataaaagccccttcaccaggagaagccgtcacacagatccacaagctcctgaagaggtaagggtttaagggatggttggttggtggggtattaatgtttaattacctggagcacctgcctgaaatcactttttttcaggttgggtttaaacgccgccaccatgcagattgaactctccacctgtttcttcctgtgcctgctgagattctgcttcagtgccaccaggaggtactacttgggtgcagtggagctctcctgggactacatgcagtcagacctgggagagctccctgtggatgccaggttccctccaagggtccctaaatccttccccttcaacacctcagtggtgtacaagaaaaccctgtttgtggaattcactgaccacctgttcaacattgccaagcccaggccaccctggatggggctcctgggcccaaccatccaagctgaagtgtatgacactgtggtcatcaccctcaagaacatggcctcccaccctgtctccctgcatgctgtgggagtgtcctactggaaggcctcagagggggctgagtatgatgaccagacctcccagagggaaaaggaagatgacaaggtgttcccaggaggatcccacacctatgtgtggcaagtcctgaaggaaaatggtcccatggcatcagaccccttgtgcttgacctactcctacctgagccatgtggacctggtcaaggacctgaactcaggccttattggagccctgcttgtatgcagagagggcagcctggccaaggaaaagacccagaccctgcacaagttcatcctcctgtttgctgtgtttgatgaaggaaagtcctggcactcagagactaagaacagcctgatgcaggacagggatgcagcatcagccagagcctggcccaagatgcacactgtgaatggatatgtgaacaggtccctccctggactaattggatgccacagaaagtctgtgtactggcatgtcattggaatgggcacaacccctgaagtgcatagcatcttcctggaaggacacaccttcctggtcaggaaccacagacaggcatccctggagatctccccaatcaccttcctgactgcccagactctcctgatggacctgggacagttcttgcttttctgccacatctcctcccaccaacatgatggcatggaagcctatgtgaaggtggactcctgccctgaggaacctcaactgaggatgaaaaacaatgaagaagctgaagattatgatgatgacctgactgactcagagatggatgttgtcagatttgatgatgacaacagccctagcttcatccagattagatctgtggccaagaagcaccccaagacctgggtgcactacattgctgctgaggaagaggactgggactatgcccccctggtgctggcccctgatgacagatcctacaagtcccagtacctgaacaatggtccccagagaattgggagaaagtacaagaaagtcagattcatggcctacactgatgaaaccttcaagactagagaagccatccagcatgagtcaggcattctgggtcccctgctgtatggggaagttggtgacaccctgctgatcatcttcaagaaccaagccagcaggccttacaacatctacccccatggaattacagatgtcaggccactgtactccaggagactgcctaagggagtcaagcacctcaaggacttccccatcctgcctggagaaatcttcaagtacaagtggactgtgactgtggaggatgggcctaccaagtcagaccctagatgcctgactaggtactactccagctttgtcaacatggagagagacttggcctcaggactcattggtccactgcttatttgctacaaggagtcagtggaccagagaggaaaccaaatcatgtctgacaagagaaatgtcatcctgttctcagtctttgatgagaacaggtcctggtacctgactgaaaacatccagagattcctgcccaaccctgctggggtgcaactggaggaccctgagttccaggcctcaaacataatgcacagcatcaatggctatgtctttgactccctgcaactgtcagtgtgcttgcatgaagtggcctactggtacatcctctccattggggcccagactgacttcctgtcagtgtttttctctggctacaccttcaagcataaaatggtgtatgaggacaccctcaccctgttccccttctctggagagactgtgttcatgagcatggaaaacccaggcctctggatccttggctgtcacaactcagacttcagaaacaggggcatgactgccctgcttaaggtgtccagctgtgacaagaacactggggactactatgaggactcctatgaggacatcagtgcctaccttctgtccaagaacaatgccattgaacctaggagcttcagccagaactccaggcacccaagcaccaggcagaagcagttcaatgccaccaccatccctgagaacactaccctgcaatcagaccaagaagaaattgactatgatgacaccatctcagtggagatgaagaaggaggactttgacatctatgatgaagatgaaaaccaaagccccagatccttccagaaaaagaccaggcactacttcattgcagcagtggagagattatgggactatgggatgtccagctcccctcatgtgctgagaaacagagcacagtctggctcagtgccccagttcaagaaggtggtgttccaggagttcactgatggttccttcacccaaccattgtacaggggagagctgaatgagcacctgggcctgttgggcccatacatcagagcagaagtggaggacaacatcatggtcaccttcagaaaccaggcctccagaccctactccttctactcctccctgatctcctatgaagaggaccaaagacagggagctgagcccagaaagaactttgtgaagccaaatgaaaccaagacctacttctggaaagtgcagcaccacatggcccccaccaaggatgagtttgactgcaaagcttgggcctacttcagtgatgtggacttggagaaggatgtgcactcaggtcttattggccctctgcttgtgtgccataccaacactcttaaccctgcacatggcagacaagtcactgtgcaggagtttgccctcttcttcaccatctttgatgaaacaaagtcctggtacttcacagaaaacatggaaaggaactgcagagccccttgcaacatccagatggaggaccccaccttcaaggaaaactacaggtttcatgccatcaatgggtacatcatggacaccctgcctggactggtcatggcccaggaccagaggatcagatggtatctgctcagcatgggaagcaatgagaacatccactccattcacttcagtggtcatgtgttcactgtcaggaaaaaggaggagtacaagatggccctctacaacctttaccctggagtgtttgaaactgtggaaatgctgccatccaaggctggcatctggagggtggaatgcctcattggtgaacacctccatgctggaatgtccaccctcttcctggtgtacagcaacaagtgccagacccccctgggaatggcttcagggcacatcagagacttccagatcactgcctctgggcagtatggacagtgggcccctaagctggccaggctccactactctggaagcatcaatgcctggtccactaaggagcccttctcctggatcaaagtggatctgctggcccccatgatcatccatggcattaagacccagggggccagacagaagttctcctccctctacataagccagttcattatcatgtacagcctggatgggaagaagtggcagacctacaggggcaactccactggaaccctgatggtgttctttgggaatgtggacagctcaggcatcaagcacaacatcttcaaccccccaatcattgccagatacatcaggctccaccccacccactacagcatcagatccaccctgagaatggaacttatgggctgtgacctcaactcctgtagcatgcccctgggcatggagtccaaggccatttcagatgcccaaatcactgcatcctcctacttcaccaacatgtttgccacttggagcccttccaaggccagactgcatctgcaaggcagatccaatgcctggaggccccaggtcaacaaccctaaggaatggctccaggtggacttccaaaagactatgaaagtcactggagtgaccacccagggagtgaagtccctgctgacctctatgtatgtgaaggaattcctcatctcctcaagccaagatggacaccagtggaccctgttcttccaaaatggaaaggtcaaagtgttccagggcaaccaggacagcttcacccctgtggtgaactccttggacccccccctgttgaccagatacctgaggatccacccccagtcctgggtccaccagattgccttgagaatggaggtgctgggctgtgaagcccaggacctctactaattaattaagagcatcttaccgccatttattcccatatttgttctgtttttcttgatttgggtatacatttaaatgttaataaaacaaaatggtggggcaatcatttacatttttagggatatgtaattactagttcaggtgtattgccacaagacaaacatgttaagaaactttcccgttatttacgctctgttcctgttaatcaacctctggattacaaaatttgtgaaagattgactgatattcttaactatgttgctccttttacgctgtgtggatatgctgctttatagcctctgtatctagctattgcttcccgtacggctttcgttttctcctccttgtataaatcctggttgctgtctcttttagaggagttgtggcccgttgtccgtcaacgtggcgtggtgtgctctgtgtttgctgacgcaacccccactggctggggcattgccaccacctgtcaactcctttctgggactttcgctttccccctcccgatcgccacggcagaactcatcgccgcctgccttgcccgctgctggacaggggctaggttgctgggcactgataattccgtggtgttgtctgtgccttctagttgccagccatctgttgtttgcccctcccccgtgccttccttgaccctggaaggtgccactcccactgtcctttcctaataaaatgaggaaattgcatcgcattgtctgagtaggtgtcattctattctggggggtggggtggggcaggacagcaagggggaggattgggaagacaatagcaggcatgctggggatgcggtgggctctatggctctagagcatggctacgtagataagtagcatggcgggttaatcattaactacacctgcaggaggaacccctagtgatggagttggccactccctctctgcgcgctcgctcgctcactgaggccgggcgaccaaaggtcgcccgacgcccgggcggcctcagtgagcgagcgagcgcgcagctgcctgcagg

SEQ ID NO: 466 - DNA, 6142 bp, Artificial Sequence
  Description of Artificial Sequence: Synthetic polynucleotide
cctgcaggcagctgcgcgctcgctcgctcactgaggccgcccgggcaaagcccgggcgtcgggcgacctttggtcgcccggcctcagtgagcgagcgagcgcgcagagagggagtggccaactccatcactaggggttccttgtagttaatgattaacccgccatgctacttatcgcggccgcaacaggttagtttgactagcgttaatcattaacgttaatcattaacgttaatcattaacgttaatcattaacgttaatcattaacatcgatgcgagaacttgtgcctccccgtgttcctgctctttgtccctctgtcctacttagactaatatttgccttgggtactgcaaacaggaaatgggggagggacaggagtagggcggagggtagttaagaatgtggatccccgtctgtctgcacatttcgtagagcgagtgttccgatactctaatctccctaggcaaggttcatatttgtgtaggttacttattctccttttgttgactaagtcaataatcagaatcagcaggtttggagtcagcttggcagggatcagcagcctgggttggaaggagggggtataaaagccccttcaccaggagaagccgtcacacagatccacaagctcctgaagaggtaagggtttaagggatggttggttggtggggtattaatgtttaattacctggagcacctgcctgaaatcactttttttcaggttgggtttaaaccgcagccaccatgcagattgaactctccacctgtttcttcctgtgcctgctgagattctgcttcagtgccaccaggaggtactacttgggtgcagtggagctctcctgggactacatgcagtcagacctgggagagctccctgtggatgccaggttccctccaagggtccctaaatccttccccttcaacacctcagtggtgtacaagaaaaccctgtttgtggaattcactgaccacctgttcaacattgccaagcccaggccaccctggatggggctcctgggcccaaccatccaagctgaagtgtatgacactgtggtcatcaccctcaagaacatggcctcccaccctgtctccctgcatgctgtgggagtgtcctactggaaggcctcagagggggctgagtatgatgaccagacctcccagagggaaaaggaagatgacaaggtgttcccaggaggatcccacacctatgtgtggcaagtcctgaaggaaaatggtcccatggcatcagaccccttgtgcttgacctactcctacctgagccatgtggacctggtcaaggacctgaactcaggccttattggagccctgcttgtatgcagagagggcagcctggccaaggaaaagacccagaccctgcacaagttcatcctcctgtttgctgtgtttgatgaaggaaagtcctggcactcagagactaagaacagcctgatgcaggacagggatgcagcatcagccagagcctggcccaagatgcacactgtgaatggatatgtgaacaggtccctccctggactaattggatgccacagaaagtctgtgtactggcatgtcattggaatgggcacaacccctgaagtgcatagcatcttcctggaaggacacaccttcctggtcaggaaccacagacaggcatccctggagatctccccaatcaccttcctgactgcccagactctcctgatggacctgggacagttcttgcttttctgccacatctcctcccaccaacatgatggcatggaagcctatgtgaaggtggactcctgccctgaggaacctcaactgaggatgaaaaacaatgaagaagctgaagattatgatgatgacctgactgactcagagatggatgttgtcagatttgatgatgacaacagccctagcttcatccagattagatctgtggccaagaagcaccccaagacctgggtgcactacattgctgctgaggaagaggactgggactatgcccccctggtgctggcccctgatgacagatcctacaagtcccagtacctgaacaatggtccccagagaattgggagaaagtacaagaaagtcagattcatggcctacactgatgaaaccttcaagactagagaagccatccagcatgagtcaggcattctgggtcccctgctgtatggggaagttggtgacaccctgctgatcatcttcaagaaccaagccagcaggccttacaacatctacccccatggaattacagatgtcaggccactgtactccaggagactgcctaagggagtcaagcacctcaaggacttccccatcctgcctggagaaatcttcaagtacaagtggactgtgactgtggaggatgggcctaccaagtcagaccctagatgcctgactaggtactactccagctttgtcaacatggagagagacttggcctcaggactcattggtccactgcttatttgctacaaggagtcagtggaccagagaggaaaccaaatcatgtctgacaagagaaatgtcatcctgttctcagtctttgatgagaacaggtcctggtacctgactgaaaacatccagagattcctgcccaaccctgctggggtgcaactggaggaccctgagttccaggcctcaaacataatgcacagcatcaatggctatgtctttgactccctgcaactgtcagtgtgcttgcatgaagtggcctactggtacatcctctccattggggcccagactgacttcctgtcagtgtttttctctggctacaccttcaagcataaaatggtgtatgaggacaccctcaccctgttccccttctctggagagactgtgttcatgagcatggaaaacccaggcctctggatccttggctgtcacaactcagacttcagaaacaggggcatgactgccctgcttaaggtgtccagctgtgacaagaacactggggactactatgaggactcctatgaggacatcagtgcctaccttctgtccaagaacaatgccattgaacctaggagcttcagccagaactccaggcacccaagcaccaggcagaagcagttcaatgccaccaccatccctgagaacactaccctgcaatcagaccaagaagaaattgactatgatgacaccatctcagtggagatgaagaaggaggactttgacatctatgatgaagatgaaaaccaaagccccagatccttccagaaaaagaccaggcactacttcattgcagcagtggagagattatgggactatgggatgtccagctcccctcatgtgctgagaaacagagcacagtctggctcagtgccccagttcaagaaggtggtgttccaggagttcactgatggttccttcacccaaccattgtacaggggagagctgaatgagcacctgggcctgttgggcccatacatcagagcagaagtggaggacaacatcatggtcaccttcagaaaccaggcctccagaccctactccttctactcctccctgatctcctatgaagaggaccaaagacagggagctgagcccagaaagaactttgtgaagccaaatgaaaccaagacctacttctggaaagtgcagcaccacatggcccccaccaaggatgagtttgactgcaaagcttgggcctacttcagtgatgtggacttggagaaggatgtgcactcaggtcttattggccctctgcttgtgtgccataccaacactcttaaccctgcacatggcagacaagtcactgtgcaggagtttgccctcttcttcaccatctttgatgaaacaaagtcctggtacttcacagaaaacatggaaaggaactgcagagccccttgcaacatccagatggaggaccccaccttcaaggaaaactacaggtttcatgccatcaatgggtacatcatggacaccctgcctggactggtcatggcccaggaccagaggatcagatggtatctgctcagcatgggaagcaatgagaacatccactccattcacttcagtggtcatgtgttcactgtcaggaaaaaggaggagtacaagatggccctctacaacctttaccctggagtgtttgaaactgtggaaatgctgccatccaaggctggcatctggagggtggaatgcctcattggtgaacacctccatgctggaatgtccaccctcttcctggtgtacagcaacaagtgccagacccccctgggaatggcttcagggcacatcagagacttccagatcactgcctctgggcagtatggacagtgggcccctaagctggccaggctccactactctggaagcatcaatgcctggtccactaaggagcccttctcctggatcaaagtggatctgctggcccccatgatcatccatggcattaagacccagggggccagacagaagttctcctccctctacataagccagttcattatcatgtacagcctggatgggaagaagtggcagacctacaggggcaactccactggaaccctgatggtgttctttgggaatgtggacagctcaggcatcaagcacaacatcttcaaccccccaatcattgccagatacatcaggctccaccccacccactacagcatcagatccaccctgagaatggaacttatgggctgtgacctcaactcctgtagcatgcccctgggcatggagtccaaggccatttcagatgcccaaatcactgcatcctcctacttcaccaacatgtttgccacttggagcccttccaaggccagactgcatctgcaaggcagatccaatgcctggaggccccaggtcaacaaccctaaggaatggctccaggtggacttccaaaagactatgaaagtcactggagtgaccacccagggagtgaagtccctgctgacctctatgtatgtgaaggaattcctcatctcctcaagccaagatggacaccagtggaccctgttcttccaaaatggaaaggtcaaagtgttccagggcaaccaggacagcttcacccctgtggtgaactccttggacccccccctgttgaccagatacctgaggatccacccccagtcctgggtccaccagattgccttgagaatggaggtgctgggctgtgaagcccaggacctctactaattaattaagagcatcttaccgccatttattcccatatttgttctgtttttcttgatttgggtatacatttaaatgttaataaaacaaaatggtggggcaatcatttacatttttagggatatgtaattactagttcaggtgtattgccacaagacaaacatgttaagaaactttcccgttatttacgctctgttcctgttaatcaacctctggattacaaaatttgtgaaagattgactgatattcttaactatgttgctccttttacgctgtgtggatatgctgctttatagcctctgtatctagctattgcttcccgtacggctttcgttttctcctccttgtataaatcctggttgctgtctcttttagaggagttgtggcccgttgtccgtcaacgtggcgtggtgtgctctgtgtttgctgacgcaacccccactggctggggcattgccaccacctgtcaactcctttctgggactttcgctttccccctcccgatcgccacggcagaactcatcgccgcctgccttgcccgctgctggacaggggctaggttgctgggcactgataattccgtggtgttgtctgtgccttctagttgccagccatctgttgtttgcccctcccccgtgccttccttgaccctggaaggtgccactcccactgtcctttcctaataaaatgaggaaattgcatcgcattgtctgagtaggtgtcattctattctggggggtggggtggggcaggacagcaagggggaggattgggaagacaatagcaggcatgctggggatgcggtgggctctatggctctagagcatggctacgtagataagtagcatggcgggttaatcattaactacacctgcaggaggaacccctagtgatggagttggccactccctctctgcgcgctcgctcgctcactgaggccgggcgaccaaaggtcgcccgacgcccgggcggcctcagtgagcgagcgagcgcgcagctgcctgcagg

SEQ ID NO: 467 - DNA, 6141 bp, Artificial Sequence
  Description of Artificial Sequence: Synthetic polynucleotide
cctgcaggcagctgcgcgctcgctcgctcactgaggccgcccgggcaaagcccgggcgtcgggcgacctttggtcgcccggcctcagtgagcgagcgagcgcgcagagagggagtggccaactccatcactaggggttccttgtagttaatgattaacccgccatgctacttatcgcggccgcaacaggttagtttgactagcgttaatcattaacgttaatcattaacgttaatcattaacgttaatcattaacgttaatcattaacatcgatgcgagaacttgtgcctccccgtgttcctgctctttgtccctctgtcctacttagactaatatttgccttgggtactgcaaacaggaaatgggggagggacaggagtagggcggagggtagttaagaatgtggatccccgtctgtctgcacatttcgtagagcgagtgttccgatactctaatctccctaggcaaggttcatatttgtgtaggttacttattctccttttgttgactaagtcaataatcagaatcagcaggtttggagtcagcttggcagggatcagcagcctgggttggaaggagggggtataaaagccccttcaccaggagaagccgtcacacagatccacaagctcctgaagaggtaagggtttaagggatggttggttggtggggtattaatgtttaattacctggagcacctgcctgaaatcactttttttcaggttgggtttaaacgccgccaccatgcagattgaactctccacctgtttcttcctgtgcctgctgagattctgcttcagtgccaccaggaggtactacttgggtgcagtggagctctcctgggactacatgcagtcagacctgggagagctccctgtggatgccaggttccctccaagggtccctaaatccttccccttcaacacctcagtggtgtacaagaaaaccctgtttgtggaattcactgaccacctgttcaacattgccaagcccaggccaccctggatggggctcctgggcccaaccatccaagctgaagtgtatgacactgtggtcatcaccctcaagaacatggcctcccaccctgtctccctgcatgctgtgggagtgtcctactggaaggcctcagagggggctgagtatgatgaccagacctcccagagggaaaaggaagatgacaaggtgttcccaggaggatcccacacctatgtgtggcaagtcctgaaggaaaatggtcccatggcatcagaccccttgtgcttgacctactcctacctgagccatgtggacctggtcaaggacctgaactcaggccttattggagccctgcttgtatgcagagagggcagcctggccaaggaaaagacccagaccctgcacaagttcatcctcctgtttgctgtgtttgatgaaggaaagtcctggcactcagagactaagaacagcctgatgcaggacagggatgcagcatcagccagagcctggcccaagatgcacactgtgaatggatatgtgaacaggtccctccctggactaattggatgccacagaaagtctgtgtactggcatgtcattggaatgggcacaacccctgaagtgcatagcatcttcctggaaggacacaccttcctggtcaggaaccacagacaggcatccctggagatctccccaatcaccttcctgactgcccagactctcctgatggacctgggacagttcttgcttttctgccacatctcctcccaccaacatgatggcatggaagcctatgtgaaggtggactcctgccctgaggaacctcaactgaggatgaaaaacaatgaagaagctgaagattatgatgatgacctgactgactcagagatggatgttgtcagatttgatgatgacaacagccctagcttcatccagattagatctgtggccaagaagcaccccaagacctgggtgcactacattgctgctgaggaagaggactgggactatgcccccctggtgctggcccctgatgacagatcctacaagtcccagtacctgaacaatggtccccagagaattgggagaaagtacaagaaagtcagattcatggcctacactgatgaaaccttcaagactagagaagccatccagcatgagtcaggcattctgggtcccctgctgtatggggaagttggtgacaccctgctgatcatcttcaagaaccaagccagcaggccttacaacatctacccccatggaattacagatgtcaggccactgtactccaggagactgcctaagggagtcaagcacctcaaggacttccccatcctgcctggagaaatcttcaagtacaagtggactgtgactgtggaggatgggcctaccaagtcagaccctagatgcctgactaggtactactccagctttgtcaacatggagagagacttggcctcaggactcattggtccactgcttatttgctacaaggagtcagtggaccagagaggaaaccaaatcatgtctgacaagagaaatgtcatcctgttctcagtctttgatgagaacaggtcctggtacctgactgaaaacatccagagattcctgcccaaccctgctggggtgcaactggaggaccctgagttccaggcctcaaacataatgcacagcatcaatggctatgtctttgactccctgcaactgtcagtgtgcttgcatgaagtggcctactggtacatcctctccattggggcccagactgacttcctgtcagtgtttttctctggctacaccttcaagcataaaatggtgtatgaggacaccctcaccctgttccccttctctggagagactgtgttcatgagcatggaaaacccaggcctctggatccttggctgtcacaactcagacttcagaaacaggggcatgactgccctgcttaaggtgtccagctgtgacaagaacactggggactactatgaggactcctatgaggacatcagtgcctaccttctgtccaagaacaatgccattgaacctaggagcttcagccagaactccaggcacccaagcaccaggcagaagcagttcaatgccaccaccatccctgagaacactaccctgcaatcagaccaagaagaaattgactatgatgacaccatctcagtggagatgaagaaggaggactttgacatctatgatgaagatgaaaaccaaagccccagatccttccagaaaaagaccaggcactacttcattgcagcagtggagagattatgggactatgggatgtccagctcccctcatgtgctgagaaacagagcacagtctggctcagtgccccagttcaagaaggtggtgttccaggagttcactgatggttccttcacccaaccattgtacaggggagagctgaatgagcacctgggcctgttgggcccatacatcagagcagaagtggaggacaacatcatggtcaccttcagaaaccaggcctccagaccctactccttctactcctccctgatctcctatgaagaggaccaaagacagggagctgagcccagaaagaactttgtgaagccaaatgaaaccaagacctacttctggaaagtgcagcaccacatggcccccaccaaggatgagtttgactgcaaagcttgggcctacttcagtgatgtggacttggagaaggatgtgcactcaggtcttattggccctctgcttgtgtgccataccaacactcttaaccctgcacatggcagacaagtcactgtgcaggagtttgccctcttcttcaccatctttgatgaaacaaagtcctggtacttcacagaaaacatggaaaggaactgcagagccccttgcaacatccagatggaggaccccaccttcaaggaaaactacaggtttcatgccatcaatgggtacatcatggacaccctgcctggactggtcatggcccaggaccagaggatcagatggtatctgctcagcatgggaagcaatgagaacatccactccattcacttcagtggtcatgtgttcactgtcaggaaaaaggaggagtacaagatggccctctacaacctttaccctggagtgtttgaaactgtggaaatgctgccatccaaggctggcatctggagggtggaatgcctcattggtgaacacctccatgctggaatgtccaccctcttcctggtgtacagcaacaagtgccagacccccctgggaatggcttcagggcacatcagagacttccagatcactgcctctgggcagtatggacagtgggcccctaagctggccaggctccactactctggaagcatcaatgcctggtccactaaggagcccttctcctggatcaaagtggatctgctggcccccatgatcatccatggcattaagacccagggggccagacagaagttctcctccctctacataagccagttcattatcatgtacagcctggatgggaagaagtggcagacctacaggggcaactccactggaaccctgatggtgttctttgggaatgtggacagctcaggcatcaagcacaacatcttcaaccccccaatcattgccagatacatcaggctccaccccacccactacagcatcagatccaccctgagaatggaacttatgggctgtgacctcaactcctgtagcatgcccctgggcatggagtccaaggccatttcagatgcccaaatcactgcatcctcctacttcaccaacatgtttgccacttggagcccttccaaggccagactgcatctgcaaggcagatccaatgcctggaggccccaggtcaacaaccctaaggaatggctccaggtggacttccaaaagactatgaaagtcactggagtgaccacccagggagtgaagtccctgctgacctctatgtatgtgaaggaattcctcatctcctcaagccaagatggacaccagtggaccctgttcttccaaaatggaaaggtcaaagtgttccagggcaaccaggacagcttcacccctgtggtgaactccttggacccccccctgttgaccagatacctgaggatccacccccagtcctgggtccaccagattgccttgagaatggaggtgctgggctgtgaagcccaggacctctactaattaattaagagcatcttaccgccatttattcccatatttgttctgtttttcttgatttgggtatacatttaaatgttaataaaacaaaatggtggggcaatcatttacatttttagggatatgtaattactagttcaggtgtattgccacaagacaaacatgttaagaaactttcccgttatttacgctctgttcctgttaatcaacctctggattacaaaatttgtgaaagattgactgatattcttaactatgttgctccttttacgctgtgtggatatgctgctttatagcctctgtatctagctattgcttcccgtacggctttcgttttctcctccttgtataaatcctggttgctgtctcttttagaggagttgtggcccgttgtccgtcaacgtggcgtggtgtgctctgtgtttgctgacgcaacccccactggctggggcattgccaccacctgtcaactcctttctgggactttcgctttccccctcccgatcgccacggcagaactcatcgccgcctgccttgcccgctgctggacaggggctaggttgctgggcactgataattccgtggtgttgtctgtgccttctagttgccagccatctgttgtttgcccctcccccgtgccttccttgaccctggaaggtgccactcccactgtcctttcctaataaaatgaggaaattgcatcgcattgtctgagtaggtgtcattctattctggggggtggggtggggcaggacagcaagggggaggattgggaagacaatagcaggcatgctggggatgcggtgggctctatggctctagagcatggctacgtagataagtagcatggcgggttaatcattaactacacctgcaggaggaacccctagtgatggagttggccactccctctctgcgcgctcgctcgctcactgaggccgggcgaccaaaggtcgcccgacgcccgggcggcctcagtgagcgagcgagcgcgcagctgcctgcagg

SEQ ID NO: 468 - DNA, 6479 bp, Artificial Sequence
  Description of Artificial Sequence: Synthetic polynucleotide
cctgcaggcagctgcgcgctcgctcgctcactgaggccgcccgggcaaagcccgggcgtcgggcgacctttggtcgcccggcctcagtgagcgagcgagcgcgcagagagggagtggccaactccatcactaggggttccttgtagttaatgattaacccgccatgctacttatcgcggccgcaacaggttagtttgactagcgttaatcattaacgttaatcattaacgttaatcattaacgttaatcattaacgttaatcattaacatcgatgcgagaacttgtgcctccccgtgttcctgctctttgtccctctgtcctacttagactaatatttgccttgggtactgcaaacaggaaatgggggagggacaggagtagggcggagggtagttaagaatgtcaattggggggaggctgctggtgaatattaaccaaggtcaccccagttatcggaggagcaaacaggggctaagtccaccgggggaggctgctggtgaatattaaccaaggtcaccccagttatcggaggagcaaacaggggctaagtccaccgggggaggctgctggtgaatattaaccaaggtcaccccagttatcggaggagcaaacaggggctaagtccacggtacccactgggaggatgttgagtaagatggaaaactactgatgacccttgcagagacagagtattaggacatgtttgaacaggggccgggcgatcagcaggtagcactagaggatccccgtctgtctgcacatttcgtagagcgagtgttccgatactctaatctccctaggcaaggttcatatttgtgtaggttacttattctccttttgttgactaagtcaataatcagaatcagcaggtttggagtcagcttggcagggatcagcagcctgggttggaaggagggggtataaaagccccttcaccaggagaagccgtcacacagatccacaagctcctgaagaggtaagggtttaagggatggttggttggtggggtattaatgtttaattacctggagcacctgcctgaaatcactttttttcaggttgggtttaaaccgcagccaccatgcagattgaactctccacctgtttcttcctgtgcctgctgagattctgcttcagtgccaccaggaggtactacttgggtgcagtggagctctcctgggactacatgcagtcagacctgggagagctccctgtggatgccaggttccctccaagggtccctaaatccttccccttcaacacctcagtggtgtacaagaaaaccctgtttgtggaattcactgaccacctgttcaacattgccaagcccaggccaccctggatggggctcctgggcccaaccatccaagctgaagtgtatgacactgtggtcatcaccctcaagaacatggcctcccaccctgtctccctgcatgctgtgggagtgtcctactggaaggcctcagagggggctgagtatgatgaccagacctcccagagggaaaaggaagatgacaaggtgttcccaggaggatcccacacctatgtgtggcaagtcctgaaggaaaatggtcccatggcatcagaccccttgtgcttgacctactcctacctgagccatgtggacctggtcaaggacctgaactcaggccttattggagccctgcttgtatgcagagagggcagcctggccaaggaaaagacccagaccctgcacaagttcatcctcctgtttgctgtgtttgatgaaggaaagtcctggcactcagagactaagaacagcctgatgcaggacagggatgcagcatcagccagagcctggcccaagatgcacactgtgaatggatatgtgaacaggtccctccctggactaattggatgccacagaaagtctgtgtactggcatgtcattggaatgggcacaacccctgaagtgcatagcatcttcctggaaggacacaccttcctggtcaggaaccacagacaggcatccctggagatctccccaatcaccttcctgactgcccagactctcctgatggacctgggacagttcttgcttttctgccacatctcctcccaccaacatgatggcatggaagcctatgtgaaggtggactcctgccctgaggaacctcaactgaggatgaaaaacaatgaagaagctgaagattatgatgatgacctgactgactcagagatggatgttgtcagatttgatgatgacaacagccctagcttcatccagattagatctgtggccaagaagcaccccaagacctgggtgcactacattgctgctgaggaagaggactgggactatgcccccctggtgctggcccctgatgacagatcctacaagtcccagtacctgaacaatggtccccagagaattgggagaaagtacaagaaagtcagattcatggcctacactgatgaaaccttcaagactagagaagccatccagcatgagtcaggcattctgggtcccctgctgtatggggaagttggtgacaccctgctgatcatcttcaagaaccaagccagcaggccttacaacatctacccccatggaattacagatgtcaggccactgtactccaggagactgcctaagggagtcaagcacctcaaggacttccccatcctgcctggagaaatcttcaagtacaagtggactgtgactgtggaggatgggcctaccaagtcagaccctagatgcctgactaggtactactccagctttgtcaacatggagagagacttggcctcaggactcattggtccactgcttatttgctacaaggagtcagtggaccagagaggaaaccaaatcatgtctgacaagagaaatgtcatcctgttctcagtctttgatgagaacaggtcctggtacctgactgaaaacatccagagattcctgcccaaccctgctggggtgcaactggaggaccctgagttccaggcctcaaacataatgcacagcatcaatggctatgtctttgactccctgcaactgtcagtgtgcttgcatgaagtggcctactggtacatcctctccattggggcccagactgacttcctgtcagtgtttttctctggctacaccttcaagcataaaatggtgtatgaggacaccctcaccctgttccccttctctggagagactgtgttcatgagcatggaaaacccaggcctctggatccttggctgtcacaactcagacttcagaaacaggggcatgactgccctgcttaaggtgtccagctgtgacaagaacactggggactactatgaggactcctatgaggacatcagtgcctaccttctgtccaagaacaatgccattgaacctaggagcttcagccagaactccaggcacccaagcaccaggcagaagcagttcaatgccaccaccatccctgagaacactaccctgcaatcagaccaagaagaaattgactatgatgacaccatctcagtggagatgaagaaggaggactttgacatctatgatgaagatgaaaaccaaagccccagatccttccagaaaaagaccaggcactacttcattgcagcagtggagagattatgggactatgggatgtccagctcccctcatgtgctgagaaacagagcacagtctggctcagtgccccagttcaagaaggtggtgttccaggagttcactgatggttccttcacccaaccattgtacaggggagagctgaatgagcacctgggcctgttgggcccatacatcagagcagaagtggaggacaacatcatggtcaccttcagaaaccaggcctccagaccctactccttctactcctccctgatctcctatgaagaggaccaaagacagggagctgagcccagaaagaactttgtgaagccaaatgaaaccaagacctacttctggaaagtgcagcaccacatggcccccaccaaggatgagtttgactgcaaagcttgggcctacttcagtgatgtggacttggagaaggatgtgcactcaggtcttattggccctctgcttgtgtgccataccaacactcttaaccctgcacatggcagacaagtcactgtgcaggagtttgccctcttcttcaccatctttgatgaaacaaagtcctggtacttcacagaaaacatggaaaggaactgcagagccccttgcaacatccagatggaggaccccaccttcaaggaaaactacaggtttcatgccatcaatgggtacatcatggacaccctgcctggactggtcatggcccaggaccagaggatcagatggtatctgctcagcatgggaagcaatgagaacatccactccattcacttcagtggtcatgtgttcactgtcaggaaaaaggaggagtacaagatggccctctacaacctttaccctggagtgtttgaaactgtggaaatgctgccatccaaggctggcatctggagggtggaatgcctcattggtgaacacctccatgctggaatgtccaccctcttcctggtgtacagcaacaagtgccagacccccctgggaatggcttcagggcacatcagagacttccagatcactgcctctgggcagtatggacagtgggcccctaagctggccaggctccactactctggaagcatcaatgcctggtccactaaggagcccttctcctggatcaaagtggatctgctggcccccatgatcatccatggcattaagacccagggggccagacagaagttctcctccctctacataagccagttcattatcatgtacagcctggatgggaagaagtggcagacctacaggggcaactccactggaaccctgatggtgttctttgggaatgtggacagctcaggcatcaagcacaacatcttcaaccccccaatcattgccagatacatcaggctccaccccacccactacagcatcagatccaccctgagaatggaacttatgggctgtgacctcaactcctgtagcatgcccctgggcatggagtccaaggccatttcagatgcccaaatcactgcatcctcctacttcaccaacatgtttgccacttggagcccttccaaggccagactgcatctgcaaggcagatccaatgcctggaggccccaggtcaacaaccctaaggaatggctccaggtggacttccaaaagactatgaaagtcactggagtgaccacccagggagtgaagtccctgctgacctctatgtatgtgaaggaattcctcatctcctcaagccaagatggacaccagtggaccctgttcttccaaaatggaaaggtcaaagtgttccagggcaaccaggacagcttcacccctgtggtgaactccttggacccccccctgttgaccagatacctgaggatccacccccagtcctgggtccaccagattgccttgagaatggaggtgctgggctgtgaagcccaggacctctactaattaattaagagcatcttaccgccatttattcccatatttgttctgtttttcttgatttgggtatacatttaaatgttaataaaacaaaatggtggggcaatcatttacatttttagggatatgtaattactagttcaggtgtattgccacaagacaaacatgttaagaaactttcccgttatttacgctctgttcctgttaatcaacctctggattacaaaatttgtgaaagattgactgatattcttaactatgttgctccttttacgctgtgtggatatgctgctttatagcctctgtatctagctattgcttcccgtacggctttcgttttctcctccttgtataaatcctggttgctgtctcttttagaggagttgtggcccgttgtccgtcaacgtggcgtggtgtgctctgtgtttgctgacgcaacccccactggctggggcattgccaccacctgtcaactcctttctgggactttcgctttccccctcccgatcgccacggcagaactcatcgccgcctgccttgcccgctgctggacaggggctaggttgctgggcactgataattccgtggtgttgtctgtgccttctagttgccagccatctgttgtttgcccctcccccgtgccttccttgaccctggaaggtgccactcccactgtcctttcctaataaaatgaggaaattgcatcgcattgtctgagtaggtgtcattctattctggggggtggggtggggcaggacagcaagggggaggattgggaagacaatagcaggcatgctggggatgcggtgggctctatggctctagagcatggctacgtagataagtagcatggcgggttaatcattaactacacctgcaggaggaacccctagtgatggagttggccactccctctctgcgcgctcgctcgctcactgaggccgggcgaccaaaggtcgcccgacgcccgggcggcctcagtgagcgagcgagcgcgcagctgcctgcagg

SEQ ID NO: 469 - DNA, 6478 bp, Artificial Sequence
  Description of Artificial Sequence: Synthetic polynucleotide
cctgcaggcagctgcgcgctcgctcgctcactgaggccgcccgggcaaagcccgggcgtcgggcgacctttggtcgcccggcctcagtgagcgagcgagcgcgcagagagggagtggccaactccatcactaggggttccttgtagttaatgattaacccgccatgctacttatcgcggccgcaacaggttagtttgactagcgttaatcattaacgttaatcattaacgttaatcattaacgttaatcattaacgttaatcattaacatcgatgcgagaacttgtgcctccccgtgttcctgctctttgtccctctgtcctacttagactaatatttgccttgggtactgcaaacaggaaatgggggagggacaggagtagggcggagggtagttaagaatgtcaattggggggaggctgctggtgaatattaaccaaggtcaccccagttatcggaggagcaaacaggggctaagtccaccgggggaggctgctggtgaatattaaccaaggtcaccccagttatcggaggagcaaacaggggctaagtccaccgggggaggctgctggtgaatattaaccaaggtcaccccagttatcggaggagcaaacaggggctaagtccacggtacccactgggaggatgttgagtaagatggaaaactactgatgacccttgcagagacagagtattaggacatgtttgaacaggggccgggcgatcagcaggtagcactagaggatccccgtctgtctgcacatttcgtagagcgagtgttccgatactctaatctccctaggcaaggttcatatttgtgtaggttacttattctccttttgttgactaagtcaataatcagaatcagcaggtttggagtcagcttggcagggatcagcagcctgggttggaaggagggggtataaaagccccttcaccaggagaagccgtcacacagatccacaagctcctgaagaggtaagggtttaagggatggttggttggtggggtattaatgtttaattacctggagcacctgcctgaaatcactttttttcaggttgggtttaaacgccgccaccatgcagattgaactctccacctgtttcttcctgtgcctgctgagattctgcttcagtgccaccaggaggtactacttgggtgcagtggagctctcctgggactacatgcagtcagacctgggagagctccctgtggatgccaggttccctccaagggtccctaaatccttccccttcaacacctcagtggtgtacaagaaaaccctgtttgtggaattcactgaccacctgttcaacattgccaagcccaggccaccctggatggggctcctgggcccaaccatccaagctgaagtgtatgacactgtggtcatcaccctcaagaacatggcctcccaccctgtctccctgcatgctgtgggagtgtcctactggaaggcctcagagggggctgagtatgatgaccagacctcccagagggaaaaggaagatgacaaggtgttcccaggaggatcccacacctatgtgtggcaagtcctgaaggaaaatggtcccatggcatcagaccccttgtgcttgacctactcctacctgagccatgtggacctggtcaaggacctgaactcaggccttattggagccctgcttgtatgcagagagggcagcctggccaaggaaaagacccagaccctgcacaagttcatcctcctgtttgctgtgtttgatgaaggaaagtcctggcactcagagactaagaacagcctgatgcaggacagggatgcagcatcagccagagcctggcccaagatgcacactgtgaatggatatgtgaacaggtccctccctggactaattggatgccacagaaagtctgtgtactggcatgtcattggaatgggcacaacccctgaagtgcatagcatcttcctggaaggacacaccttcctggtcaggaaccacagacaggcatccctggagatctccccaatcaccttcctgactgcccagactctcctgatggacctgggacagttcttgcttttctgccacatctcctcccaccaacatgatggcatggaagcctatgtgaaggtggactcctgccctgaggaacctcaactgaggatgaaaaacaatgaagaagctgaagattatgatgatgacctgactgactcagagatggatgttgtcagatttgatgatgacaacagccctagcttcatccagattagatctgtggccaagaagcaccccaagacctgggtgcactacattgctgctgaggaagaggactgggactatgcccccctggtgctggcccctgatgacagatcctacaagtcccagtacctgaacaatggtccccagagaattgggagaaagtacaagaaagtcagattcatggcctacactgatgaaaccttcaagactagagaagccatccagcatgagtcaggcattctgggtcccctgctgtatggggaagttggtgacaccctgctgatcatcttcaagaaccaagccagcaggccttacaacatctacccccatggaattacagatgtcaggccactgtactccaggagactgcctaagggagtcaagcacctcaaggacttccccatcctgcctggagaaatcttcaagtacaagtggactgtgactgtggaggatgggcctaccaagtcagaccctagatgcctgactaggtactactccagctttgtcaacatggagagagacttggcctcaggactcattggtccactgcttatttgctacaaggagtcagtggaccagagaggaaaccaaatcatgtctgacaagagaaatgtcatcctgttctcagtctttgatgagaacaggtcctggtacctgactgaaaacatccagagattcctgcccaaccctgctggggtgcaactggaggaccctgagttccaggcctcaaacataatgcacagcatcaatggctatgtctttgactccctgcaactgtcagtgtgcttgcatgaagtggcctactggtacatcctctccattggggcccagactgacttcctgtcagtgtttttctctggctacaccttcaagcataaaatggtgtatgaggacaccctcaccctgttccccttctctggagagactgtgttcatgagcatggaaaacccaggcctctggatccttggctgtcacaactcagacttcagaaacaggggcatgactgccctgcttaaggtgtccagctgtgacaagaacactggggactactatgaggactcctatgaggacatcagtgcctaccttctgtccaagaacaatgccattgaacctaggagcttcagccagaactccaggcacccaagcaccaggcagaagcagttcaatgccaccaccatccctgagaacactaccctgcaatcagaccaagaagaaattgactatgatgacaccatctcagtggagatgaagaaggaggactttgacatctatgatgaagatgaaaaccaaagccccagatccttccagaaaaagaccaggcactacttcattgcagcagtggagagattatgggactatgggatgtccagctcccctcatgtgctgagaaacagagcacagtctggctcagtgccccagttcaagaaggtggtgttccaggagttcactgatggttccttcacccaaccattgtacaggggagagctgaatgagcacctgggcctgttgggcccatacatcagagcagaagtggaggacaacatcatggtcaccttcagaaaccaggcctccagaccctactccttctactcctccctgatctcctatgaagaggaccaaagacagggagctgagcccagaaagaactttgtgaagccaaatgaaaccaagacctacttctggaaagtgcagcaccacatggcccccaccaaggatgagtttgactgcaaagcttgggcctacttcagtgatgtggacttggagaaggatgtgcactcaggtcttattggccctctgcttgtgtgccataccaacactcttaaccctgcacatggcagacaagtcactgtgcaggagtttgccctcttcttcaccatctttgatgaaacaaagtcctggtacttcacagaaaacatggaaaggaactgcagagccccttgcaacatccagatggaggaccccaccttcaaggaaaactacaggtttcatgccatcaatgggtacatcatggacaccctgcctggactggtcatggcccaggaccagaggatcagatggtatctgctcagcatgggaagcaatgagaacatccactccattcacttcagtggtcatgtgttcactgtcaggaaaaaggaggagtacaagatggccctctacaacctttaccctggagtgtttgaaactgtggaaatgctgccatccaaggctggcatctggagggtggaatgcctcattggtgaacacctccatgctggaatgtccaccctcttcctggtgtacagcaacaagtgccagacccccctgggaatggcttcagggcacatcagagacttccagatcactgcctctgggcagtatggacagtgggcccctaagctggccaggctccactactctggaagcatcaatgcctggtccactaaggagcccttctcctggatcaaagtggatctgctggcccccatgatcatccatggcattaagacccagggggccagacagaagttctcctccctctacataagccagttcattatcatgtacagcctggatgggaagaagtggcagacctacaggggcaactccactggaaccctgatggtgttctttgggaatgtggacagctcaggcatcaagcacaacatcttcaaccccccaatcattgccagatacatcaggctccaccccacccactacagcatcagatccaccctgagaatggaacttatgggctgtgacctcaactcctgtagcatgcccctgggcatggagtccaaggccatttcagatgcccaaatcactgcatcctcctacttcaccaacatgtttgccacttggagcccttccaaggccagactgcatctgcaaggcagatccaatgcctggaggccccaggtcaacaaccctaaggaatggctccaggtggacttccaaaagactatgaaagtcactggagtgaccacccagggagtgaagtccctgctgacctctatgtatgtgaaggaattcctcatctcctcaagccaagatggacaccagtggaccctgttcttccaaaatggaaaggtcaaagtgttccagggcaaccaggacagcttcacccctgtggtgaactccttggacccccccctgttgaccagatacctgaggatccacccccagtcctgggtccaccagattgccttgagaatggaggtgctgggctgtgaagcccaggacctctactaattaattaagagcatcttaccgccatttattcccatatttgttctgtttttcttgatttgggtatacatttaaatgttaataaaacaaaatggtggggcaatcatttacatttttagggatatgtaattactagttcaggtgtattgccacaagacaaacatgttaagaaactttcccgttatttacgctctgttcctgttaatcaacctctggattacaaaatttgtgaaagattgactgatattcttaactatgttgctccttttacgctgtgtggatatgctgctttatagcctctgtatctagctattgcttcccgtacggctttcgttttctcctccttgtataaatcctggttgctgtctcttttagaggagttgtggcccgttgtccgtcaacgtggcgtggtgtgctctgtgtttgctgacgcaacccccactggctggggcattgccaccacctgtcaactcctttctgggactttcgctttccccctcccgatcgccacggcagaactcatcgccgcctgccttgcccgctgctggacaggggctaggttgctgggcactgataattccgtggtgttgtctgtgccttctagttgccagccatctgttgtttgcccctcccccgtgccttccttgaccctggaaggtgccactcccactgtcctttcctaataaaatgaggaaattgcatcgcattgtctgagtaggtgtcattctattctggggggtggggtggggcaggacagcaagggggaggattgggaagacaatagcaggcatgctggggatgcggtgggctctatggctctagagcatggctacgtagataagtagcatggcgggttaatcattaactacacctgcaggaggaacccctagtgatggagttggccactccctctctgcgcgctcgctcgctcactgaggccgggcgaccaaaggtcgcccgacgcccgggcggcctcagtgagcgagcgagcgcgcagctgcctgcagg

SEQ ID NO: 470 - DNA, 6187 bp, Artificial Sequence
  Description of Artificial Sequence: Synthetic polynucleotide
cctgcaggcagctgcgcgctcgctcgctcactgaggccgcccgggcaaagcccgggcgtcgggcgacctttggtcgcccggcctcagtgagcgagcgagcgcgcagagagggagtggccaactccatcactaggggttccttgtagttaatgattaacccgccatgctacttatcgcggccgcgttaatcattaacgcttgtactttggtacagttaatcattaacgcttgtactttggtacagttaatcattaacgcttgtactttggtacaatcgatgcgagaacttgtgcctccccgtgttcctgctctttgtccctctgtcctacttagactaatatttgccttgggtactgcaaacaggaaatgggggagggacaggagtagggcggagggtagcccggggattctgcagtgagagcagagggccagctaagtggtactctcccagagactgtctgactcacgccaccccctccaccttggacacaggacgctgtggtttctgagccaggtacaatgactcctttcggtaagtgcagtggaagctgtacactgcccaggcaaagcgtccgggcagcgtaggcgggcgactcagatcccagccagtggacttagcccctgtttgctcctccgataactggggtgaccttggttaatattcaccagcagcctcccccgttgcccctctggatccactgcttaaatacggacgaggacagggccctgtctcctcagcttcaggcaccaccactgacctgggacagtgaatgtttaaaccgcagccaccatgcagattgaactctccacctgtttcttcctgtgcctgctgagattctgcttcagtgccaccaggaggtactacttgggtgcagtggagctctcctgggactacatgcagtcagacctgggagagctccctgtggatgccaggttccctccaagggtccctaaatccttccccttcaacacctcagtggtgtacaagaaaaccctgtttgtggaattcactgaccacctgttcaacattgccaagcccaggccaccctggatggggctcctgggcccaaccatccaagctgaagtgtatgacactgtggtcatcaccctcaagaacatggcctcccaccctgtctccctgcatgctgtgggagtgtcctactggaaggcctcagagggggctgagtatgatgaccagacctcccagagggaaaaggaagatgacaaggtgttcccaggaggatcccacacctatgtgtggcaagtcctgaaggaaaatggtcccatggcatcagaccccttgtgcttgacctactcctacctgagccatgtggacctggtcaaggacctgaactcaggccttattggagccctgcttgtatgcagagagggcagcctggccaaggaaaagacccagaccctgcacaagttcatcctcctgtttgctgtgtttgatgaaggaaagtcctggcactcagagactaagaacagcctgatgcaggacagggatgcagcatcagccagagcctggcccaagatgcacactgtgaatggatatgtgaacaggtccctccctggactaattggatgccacagaaagtctgtgtactggcatgtcattggaatgggcacaacccctgaagtgcatagcatcttcctggaaggacacaccttcctggtcaggaaccacagacaggcatccctggagatctccccaatcaccttcctgactgcccagactctcctgatggacctgggacagttcttgcttttctgccacatctcctcccaccaacatgatggcatggaagcctatgtgaaggtggactcctgccctgaggaacctcaactgaggatgaaaaacaatgaagaagctgaagattatgatgatgacctgactgactcagagatggatgttgtcagatttgatgatgacaacagccctagcttcatccagattagatctgtggccaagaagcaccccaagacctgggtgcactacattgctgctgaggaagaggactgggactatgcccccctggtgctggcccctgatgacagatcctacaagtcccagtacctgaacaatggtccccagagaattgggagaaagtacaagaaagtcagattcatggcctacactgatgaaaccttcaagactagagaagccatccagcatgagtcaggcattctgggtcccctgctgtatggggaagttggtgacaccctgctgatcatcttcaagaaccaagccagcaggccttacaacatctacccccatggaattacagatgtcaggccactgtactccaggagactgcctaagggagtcaagcacctcaaggacttccccatcctgcctggagaaatcttcaagtacaagtggactgtgactgtggaggatgggcctaccaagtcagaccctagatgcctgactaggtactactccagctttgtcaacatggagagagacttggcctcaggactcattggtccactgcttatttgctacaaggagtcagtggaccagagaggaaaccaaatcatgtctgacaagagaaatgtcatcctgttctcagtctttgatgagaacaggtcctggtacctgactgaaaacatccagagattcctgcccaaccctgctggggtgcaactggaggaccctgagttccaggcctcaaacataatgcacagcatcaatggctatgtctttgactccctgcaactgtcagtgtgcttgcatgaagtggcctactggtacatcctctccattggggcccagactgacttcctgtcagtgtttttctctggctacaccttcaagcataaaatggtgtatgaggacaccctcaccctgttccccttctctggagagactgtgttcatgagcatggaaaacccaggcctctggatccttggctgtcacaactcagacttcagaaacaggggcatgactgccctgcttaaggtgtccagctgtgacaagaacactggggactactatgaggactcctatgaggacatcagtgcctaccttctgtccaagaacaatgccattgaacctaggagcttcagccagaactccaggcacccaagcaccaggcagaagcagttcaatgccaccaccatccctgagaacactaccctgcaatcagaccaagaagaaattgactatgatgacaccatctcagtggagatgaagaaggaggactttgacatctatgatgaagatgaaaaccaaagccccagatccttccagaaaaagaccaggcactacttcattgcagcagtggagagattatgggactatgggatgtccagctcccctcatgtgctgagaaacagagcacagtctggctcagtgccccagttcaagaaggtggtgttccaggagttcactgatggttccttcacccaaccattgtacaggggagagctgaatgagcacctgggcctgttgggcccatacatcagagcagaagtggaggacaacatcatggtcaccttcagaaaccaggcctccagaccctactccttctactcctccctgatctcctatgaagaggaccaaagacagggagctgagcccagaaagaactttgtgaagccaaatgaaaccaagacctacttctggaaagtgcagcaccacatggcccccaccaaggatgagtttgactgcaaagcttgggcctacttcagtgatgtggacttggagaaggatgtgcactcaggtcttattggccctctgcttgtgtgccataccaacactcttaaccctgcacatggcagacaagtcactgtgcaggagtttgccctcttcttcaccatctttgatgaaacaaagtcctggtacttcacagaaaacatggaaaggaactgcagagccccttgcaacatccagatggaggaccccaccttcaaggaaaactacaggtttcatgccatcaatgggtacatcatggacaccctgcctggactggtcatggcccaggaccagaggatcagatggtatctgctcagcatgggaagcaatgagaacatccactccattcacttcagtggtcatgtgttcactgtcaggaaaaaggaggagtacaagatggccctctacaacctttaccctggagtgtttgaaactgtggaaatgctgccatccaaggctggcatctggagggtggaatgcctcattggtgaacacctccatgctggaatgtccaccctcttcctggtgtacagcaacaagtgccagacccccctgggaatggcttcagggcacatcagagacttccagatcactgcctctgggcagtatggacagtgggcccctaagctggccaggctccactactctggaagcatcaatgcctggtccactaaggagcccttctcctggatcaaagtggatctgctggcccccatgatcatccatggcattaagacccagggggccagacagaagttctcctccctctacataagccagttcattatcatgtacagcctggatgggaagaagtggcagacctacaggggcaactccactggaaccctgatggtgttctttgggaatgtggacagctcaggcatcaagcacaacatcttcaaccccccaatcattgccagatacatcaggctccaccccacccactacagcatcagatccaccctgagaatggaacttatgggctgtgacctcaactcctgtagcatgcccctgggcatggagtccaaggccatttcagatgcccaaatcactgcatcctcctacttcaccaacatgtttgccacttggagcccttccaaggccagactgcatctgcaaggcagatccaatgcctggaggccccaggtcaacaaccctaaggaatggctccaggtggacttccaaaagactatgaaagtcactggagtgaccacccagggagtgaagtccctgctgacctctatgtatgtgaaggaattcctcatctcctcaagccaagatggacaccagtggaccctgttcttccaaaatggaaaggtcaaagtgttccagggcaaccaggacagcttcacccctgtggtgaactccttggacccccccctgttgaccagatacctgaggatccacccccagtcctgggtccaccagattgccttgagaatggaggtgctgggctgtgaagcccaggacctctactaattaattaagagcatcttaccgccatttattcccatatttgttctgtttttcttgatttgggtatacatttaaatgttaataaaacaaaatggtggggcaatcatttacatttttagggatatgtaattactagttcaggtgtattgccacaagacaaacatgttaagaaactttcccgttatttacgctctgttcctgttaatcaacctctggattacaaaatttgtgaaagattgactgatattcttaactatgttgctccttttacgctgtgtggatatgctgctttatagcctctgtatctagctattgcttcccgtacggctttcgttttctcctccttgtataaatcctggttgctgtctcttttagaggagttgtggcccgttgtccgtcaacgtggcgtggtgtgctctgtgtttgctgacgcaacccccactggctggggcattgccaccacctgtcaactcctttctgggactttcgctttccccctcccgatcgccacggcagaactcatcgccgcctgccttgcccgctgctggacaggggctaggttgctgggcactgataattccgtggtgttgtctgtgccttctagttgccagccatctgttgtttgcccctcccccgtgccttccttgaccctggaaggtgccactcccactgtcctttcctaataaaatgaggaaattgcatcgcattgtctgagtaggtgtcattctattctggggggtggggtggggcaggacagcaagggggaggattgggaagacaatagcaggcatgctggggatgcggtgggctctatggctctagagcatggctacgtagataagtagcatggcgggttaatcattaactacacctgcaggaggaacccctagtgatggagttggccactccctctctgcgcgctcgctcgctcactgaggccgggcgaccaaaggtcgcccgacgcccgggcggcctcagtgagcgagcgagcgcgcagctgcctgcagg

SEQ ID NO: 471 - DNA, 6870 bp, Artificial Sequence
  Description of Artificial Sequence: Synthetic polynucleotide
cctgcaggcagctgcgcgctcgctcgctcactgaggccgcccgggcaaagcccgggcgtcgggcgacctttggtcgcccggcctcagtgagcgagcgagcgcgcagagagggagtggccaactccatcactaggggttccttgtagttaatgattaacccgccatgctacttatcgcggccgcaggctcagaggcacacaggagtttctgggctcaccctgcccccttccaacccctcagttcccatcctccagcagctgtttgtgtgctgcctctgaagtccacactgaacaaacttcagcctactcatgtccctaaaatgggcaaacattgcaagcagcaaacagcaaacacacagccctccctgcctgctgaccttggagctggggcagaggtcagagacctctctgggcccatgccacctccaacatccactcgaccccttggaatttcggtggagaggagcagaggttgtcctggcgtggtttaggtagtgtgagagggtccgggttcaaaaccacttgctgggtggggagtcgtcagtaagtggctatgccccgaccccgaagcctgtttccccatctgtacaatggaaatgataaagacgcccatctgatagggtttttgtggcaaataaacatttggtttttttgttttgttttgttttgttttttgagatggaggtttgctctgtcgcccaggctggagtgcagtgacacaatctcatctcaccacaaccttcccctgcctcagcctcccaagtagctgggattacaagcatgtgccaccacacctggctaattttctatttttagtagagacgggtttctccatgttggtcagcctcagcctcccaagtaactgggattacaggcctgtgccaccacacccggctaattttttctatttttgacagggacggggtttcaccatgttggtcaggctggtctagaggtactggatcttgctaccagtggaacagccactaaggattctgcagtgagagcagagggccagctaagtggtactctcccagagactgtctgactcacgccaccccctccaccttggacacaggacgctgtggtttctgagccaggtacaatgactcctttcggtaagtgcagtggaagctgtacactgcccaggcaaagcgtccgggcagcgtaggcgggcgactcagatcccagccagtggacttagcccctgtttgctcctccgataactggggtgaccttggttaatattcaccagcagcctcccccgttgcccctctggatccactgcttaaatacggacgaggacagggccctgtctcctcagcttcaggcaccaccactgacctgggacagtgaataattactctaaggtaaatataaaatttttaagtgtataatgtgttaaactactgattctaattgtttctctcttttagattccaacctttggaactgagtttaaaccgcagccaccatgcagattgaactctccacctgtttcttcctgtgcctgctgagattctgcttcagtgccaccaggaggtactacttgggtgcagtggagctctcctgggactacatgcagtcagacctgggagagctccctgtggatgccaggttccctccaagggtccctaaatccttccccttcaacacctcagtggtgtacaagaaaaccctgtttgtggaattcactgaccacctgttcaacattgccaagcccaggccaccctggatggggctcctgggcccaaccatccaagctgaagtgtatgacactgtggtcatcaccctcaagaacatggcctcccaccctgtctccctgcatgctgtgggagtgtcctactggaaggcctcagagggggctgagtatgatgaccagacctcccagagggaaaaggaagatgacaaggtgttcccaggaggatcccacacctatgtgtggcaagtcctgaaggaaaatggtcccatggcatcagaccccttgtgcttgacctactcctacctgagccatgtggacctggtcaaggacctgaactcaggccttattggagccctgcttgtatgcagagagggcagcctggccaaggaaaagacccagaccctgcacaagttcatcctcctgtttgctgtgtttgatgaaggaaagtcctggcactcagagactaagaacagcctgatgcaggacagggatgcagcatcagccagagcctggcccaagatgcacactgtgaatggatatgtgaacaggtccctccctggactaattggatgccacagaaagtctgtgtactggcatgtcattggaatgggcacaacccctgaagtgcatagcatcttcctggaaggacacaccttcctggtcaggaaccacagacaggcatccctggagatctccccaatcaccttcctgactgcccagactctcctgatggacctgggacagttcttgcttttctgccacatctcctcccaccaacatgatggcatggaagcctatgtgaaggtggactcctgccctgaggaacctcaactgaggatgaaaaacaatgaagaagctgaagattatgatgatgacctgactgactcagagatggatgttgtcagatttgatgatgacaacagccctagcttcatccagattagatctgtggccaagaagcaccccaagacctgggtgcactacattgctgctgaggaagaggactgggactatgcccccctggtgctggcccctgatgacagatcctacaagtcccagtacctgaacaatggtccccagagaattgggagaaagtacaagaaagtcagattcatggcctacactgatgaaaccttcaagactagagaagccatccagcatgagtcaggcattctgggtcccctgctgtatggggaagttggtgacaccctgctgatcatcttcaagaaccaagccagcaggccttacaacatctacccccatggaattacagatgtcaggccactgtactccaggagactgcctaagggagtcaagcacctcaaggacttccccatcctgcctggagaaatcttcaagtacaagtggactgtgactgtggaggatgggcctaccaagtcagaccctagatgcctgactaggtactactccagctttgtcaacatggagagagacttggcctcaggactcattggtccactgcttatttgctacaaggagtcagtggaccagagaggaaaccaaatcatgtctgacaagagaaatgtcatcctgttctcagtctttgatgagaacaggtcctggtacctgactgaaaacatccagagattcctgcccaaccctgctggggtgcaactggaggaccctgagttccaggcctcaaacataatgcacagcatcaatggctatgtctttgactccctgcaactgtcagtgtgcttgcatgaagtggcctactggtacatcctctccattggggcccagactgacttcctgtcagtgtttttctctggctacaccttcaagcataaaatggtgtatgaggacaccctcaccctgttccccttctctggagagactgtgttcatgagcatggaaaacccaggcctctggatccttggctgtcacaactcagacttcagaaacaggggcatgactgccctgcttaaggtgtccagctgtgacaagaacactggggactactatgaggactcctatgaggacatcagtgcctaccttctgtccaagaacaatgccattgaacctaggagcttcagccagaactccaggcacccaagcaccaggcagaagcagttcaatgccaccaccatccctgagaacactaccctgcaatcagaccaagaagaaattgactatgatgacaccatctcagtggagatgaagaaggaggactttgacatctatgatgaagatgaaaaccaaagccccagatccttccagaaaaagaccaggcactacttcattgcagcagtggagagattatgggactatgggatgtccagctcccctcatgtgctgagaaacagagcacagtctggctcagtgccccagttcaagaaggtggtgttccaggagttcactgatggttccttcacccaaccattgtacaggggagagctgaatgagcacctgggcctgttgggcccatacatcagagcagaagtggaggacaacatcatggtcaccttcagaaaccaggcctccagaccctactccttctactcctccctgatctcctatgaagaggaccaaagacagggagctgagcccagaaagaactttgtgaagccaaatgaaaccaagacctacttctggaaagtgcagcaccacatggcccccaccaaggatgagtttgactgcaaagcttgggcctacttcagtgatgtggacttggagaaggatgtgcactcaggtcttattggccctctgcttgtgtgccataccaacactcttaaccctgcacatggcagacaagtcactgtgcaggagtttgccctcttcttcaccatctttgatgaaacaaagtcctggtacttcacagaaaacatggaaaggaactgcagagccccttgcaacatccagatggaggaccccaccttcaaggaaaactacaggtttcatgccatcaatgggtacatcatggacaccctgcctggactggtcatggcccaggaccagaggatcagatggtatctgctcagcatgggaagcaatgagaacatccactccattcacttcagtggtcatgtgttcactgtcaggaaaaaggaggagtacaagatggccctctacaacctttaccctggagtgtttgaaactgtggaaatgctgccatccaaggctggcatctggagggtggaatgcctcattggtgaacacctccatgctggaatgtccaccctcttcctggtgtacagcaacaagtgccagacccccctgggaatggcttcagggcacatcagagacttccagatcactgcctctgggcagtatggacagtgggcccctaagctggccaggctccactactctggaagcatcaatgcctggtccactaaggagcccttctcctggatcaaagtggatctgctggcccccatgatcatccatggcattaagacccagggggccagacagaagttctcctccctctacataagccagttcattatcatgtacagcctggatgggaagaagtggcagacctacaggggcaactccactggaaccctgatggtgttctttgggaatgtggacagctcaggcatcaagcacaacatcttcaaccccccaatcattgccagatacatcaggctccaccccacccactacagcatcagatccaccctgagaatggaacttatgggctgtgacctcaactcctgtagcatgcccctgggcatggagtccaaggccatttcagatgcccaaatcactgcatcctcctacttcaccaacatgtttgccacttggagcccttccaaggccagactgcatctgcaaggcagatccaatgcctggaggccccaggtcaacaaccctaaggaatggctccaggtggacttccaaaagactatgaaagtcactggagtgaccacccagggagtgaagtccctgctgacctctatgtatgtgaaggaattcctcatctcctcaagccaagatggacaccagtggaccctgttcttccaaaatggaaaggtcaaagtgttccagggcaaccaggacagcttcacccctgtggtgaactccttggacccccccctgttgaccagatacctgaggatccacccccagtcctgggtccaccagattgccttgagaatggaggtgctgggctgtgaagcccaggacctctactaattaattaagagcatcttaccgccatttattcccatatttgttctgtttttcttgatttgggtatacatttaaatgttaataaaacaaaatggtggggcaatcatttacatttttagggatatgtaattactagttcaggtgtattgccacaagacaaacatgttaagaaactttcccgttatttacgctctgttcctgttaatcaacctctggattacaaaatttgtgaaagattgactgatattcttaactatgttgctccttttacgctgtgtggatatgctgctttatagcctctgtatctagctattgcttcccgtacggctttcgttttctcctccttgtataaatcctggttgctgtctcttttagaggagttgtggcccgttgtccgtcaacgtggcgtggtgtgctctgtgtttgctgacgcaacccccactggctggggcattgccaccacctgtcaactcctttctgggactttcgctttccccctcccgatcgccacggcagaactcatcgccgcctgccttgcccgctgctggacaggggctaggttgctgggcactgataattccgtggtgttgtctgtgccttctagttgccagccatctgttgtttgcccctcccccgtgccttccttgaccctggaaggtgccactcccactgtcctttcctaataaaatgaggaaattgcatcgcattgtctgagtaggtgtcattctattctggggggtggggtggggcaggacagcaagggggaggattgggaagacaatagcaggcatgctggggatgcggtgggctctatggctctagagcatggctacgtagataagtagcatggcgggttaatcattaactacacctgcaggaggaacccctagtgatggagttggccactccctctctgcgcgctcgctcgctcactgaggccgggcgaccaaaggtcgcccgacgcccgggcggcctcagtgagcgagcgagcgcgcagctgcctgcagg

SEQ ID NO: 472 - DNA, 6870 bp, Artificial Sequence; identical to SEQ ID NO: 471
  Description of Artificial Sequence: Synthetic polynucleotide

SEQ ID NO: 473 - DNA, 6855 bp, Artificial Sequence
  Description of Artificial Sequence: Synthetic polynucleotide
cctgcaggcagctgcgcgctcgctcgctcactgaggccgcccgggcaaagcccgggcgtcgggcgacctttggtcgcccggcctcagtgagcgagcgagcgcgcagagagggagtggccaactccatcactaggggttccttgtagttaatgattaacccgccatgctacttatcgcggccgcaggctcagaggcacacaggagtttctgggctcaccctgcccccttccaacccctcagttcccatcctccagcagctgtttgtgtgctgcctctgaagtccacactgaacaaacttcagcctactcatgtccctaaaatgggcaaacattgcaagcagcaaacagcaaacacacagccctccctgcctgctgaccttggagctggggcagaggtcagagacctctctgggcccatgccacctccaacatccactcgaccccttggaatttcggtggagaggagcagaggttgtcctggcgtggtttaggtagtgtgagagggtccgggttcaaaaccacttgctgggtggggagtcgtcagtaagtggctatgccccgaccccgaagcctgtttccccatctgtacaatggaaatgataaagacgcccatctgatagggtttttgtggcaaataaacatttggtttttttgttttgttttgttttgttttttgagatggaggtttgctctgtcgcccaggctggagtgcagtgacacaatctcatctcaccacaaccttcccctgcctcagcctcccaagtagctgggattacaagcatgtgccaccacacctggctaattttctatttttagtagagacgggtttctccatgttggtcagcctcagcctcccaagtaactgggattacaggcctgtgccaccacacccggctaattttttctatttttgacagggacggggtttcaccatgttggtcaggctggtctagaggtactggatcttgctaccagtggaacagccactaaggattctgcagtgagagcagagggccagctaagtggtactctcccagagactgtctgactcacgccaccccctccaccttggacacaggacgctgtggtttctgagccaggtacaatgactcctttcggtaagtgcagtggaagctgtacactgcccaggcaaagcgtccgggcagcgtaggcgggcgactcagatcccagccagtggacttagcccctgtttgctcctccgataactggggtgaccttggttaatattcaccagcagcctcccccgttgcccctctggatccactgcttaaatacggacgaggacagggccctgtctcctcagcttcaggcaccaccactgacctgggacagtgaataattactctaaggtaaatataaaatttttaagtgtataatgtgttaaactactgattctaattgtttctctcttttagattccaacctttggaactgaaccatgcagattgaactctccacctgtttcttcctgtgcctgctgagattctgcttcagtgccaccaggaggtactacttgggtgcagtggagctctcctgggactacatgcagtcagacctgggagagctccctgtggatgccaggttccctccaagggtccctaaatccttccccttcaacacctcagtggtgtacaagaaaaccctgtttgtggaattcactgaccacctgttcaacattgccaagcccaggccaccctggatggggctcctgggcccaaccatccaagctgaagtgtatgacactgtggtcatcaccctcaagaacatggcctcccaccctgtctccctgcatgctgtgggagtgtcctactggaaggcctcagagggggctgagtatgatgaccagacctcccagagggaaaaggaagatgacaaggtgttcccaggaggatcccacacctatgtgtggcaagtcctgaaggaaaatggtcccatggcatcagaccccttgtgcttgacctactcctacctgagccatgtggacctggtcaaggacctgaactcaggccttattggagccctgcttgtatgcagagagggcagcctggccaaggaaaagacccagaccctgcacaagttcatcctcctgtttgctgtgtttgatgaaggaaagtcctggcactcagagactaagaacagcctgatgcaggacagggatgcagcatcagccagagcctggcccaagatgcacactgtgaatggatatgtgaacaggtccctccctggactaattggatgccacagaaagtctgtgtactggcatgtcattggaatgggcacaacccctgaagtgcatagcatcttcctggaaggacacaccttcctggtcaggaaccacagacaggcatccctggagatctccccaatcaccttcctgactgcccagactctcctgatggacctgggacagttcttgcttttctgccacatctcctcccaccaacatgatggcatggaagcctatgtgaaggtggactcctgccctgaggaacctcaactgaggatgaaaaacaatgaagaagctgaagattatgatgatgacctgactgactcagagatggatgttgtcagatttgatgatgacaacagccctagcttcatccagattagatctgtggccaagaagcaccccaagacctgggtgcactacattgctgctgaggaagaggactgggactatgcccccctggtgctggcccctgatgacagatcctacaagtcccagtacctgaacaatggtccccagagaattgggagaaagtacaagaaagtcagattcatggcctacactgatgaaaccttcaagactagagaagccatccagcatgagtcaggcattctgggtcccctgctgtatggggaagttggtgacaccctgctgatcatcttcaagaaccaagccagcaggccttacaacatctacccccatggaattacagatgtcaggccactgtactccaggagactgcctaagggagtcaagcacctcaaggacttccccatcctgcctggagaaatcttcaagtacaagtggactgtgactgtggaggatgggcctaccaagtcagaccctagatgcctgactaggtactactccagctttgtcaacatggagagagacttggcctcaggactcattggtccactgcttatttgctacaaggagtcagtggaccagagaggaaaccaaatcatgtctgacaagagaaatgtcatcctgttctcagtctttgatgagaacaggtcctggtacctgactgaaaacatccagagattcctgcccaaccctgctggggtgcaactggaggaccctgagttccaggcctcaaacataatgcacagcatcaatggctatgtctttgactccctgcaactgtcagtgtgcttgcatgaagtggcctactggtacatcctctccattggggcccagactgacttcctgtcagtgtttttctctggctacaccttcaagcataaaatggtgtatgaggacaccctcaccctgttccccttctctggagagactgtgttcatgagcatggaaaacccaggcctctggatccttggctgtcacaactcagacttcagaaacaggggcatgactgccctgcttaaggtgtccagctgtgacaagaacactggggactactatgaggactcctatgaggacatcagtgcctaccttctgtccaagaacaatgccattgaacctaggagcttcagccagaactccaggcacccaagcaccaggcagaagcagttcaatgccaccaccatccctgagaacactaccctgcaatcagaccaagaagaaattgactatgatgacaccatctcagtggagatgaagaaggaggactttgacatctatgatgaagatgaaaaccaaagccccagatccttccagaaaaagaccaggcactacttcattgcagcagtggagagattatgggactatgggatgtccagctcccctcatgtgctgagaaacagagcacagtctggctcagtgccccagttcaagaaggtggtgttccaggagttcactgatggttccttcacccaaccattgtacaggggagagctgaatgagcacctgggcctgttgggcccatacatcagagcagaagtggaggacaacatcatggtcaccttcagaaaccaggcctccagaccctactccttctactcctccctgatctcctatgaagaggaccaaagacagggagctgagcccagaaagaactttgtgaagccaaatgaaaccaagacctacttctggaaagtgcagcaccacatggcccccaccaaggatgagtttgactgcaaagcttgggcctacttcagtgatgtggacttggagaaggatgtgcactcaggtcttattggccctctgcttgtgtgccataccaacactcttaaccctgcacatggcagacaagtcactgtgcaggagtttgccctcttcttcaccatctttgatgaaacaaagtcctggtacttcacagaaaacatggaaaggaactgcagagccccttgcaacatccagatggaggaccccaccttcaaggaaaactacaggtttcatgccatcaatgggtacatcatggacaccctgcctggactggtcatggcccaggaccagaggatcagatggtatctgctcagcatgggaagcaatgagaacatccactccattcacttcagtggtcatgtgttcactgtcaggaaaaaggaggagtacaagatggccctctacaacctttaccctggagtgtttgaaactgtggaaatgctgccatccaaggctggcatctggagggtggaatgcctcattggtgaacacctccatgctggaatgtccaccctcttcctggtgtacagcaacaagtgccagacccccctgggaatggcttcagggcacatcagagacttccagatcactgcctctgggcagtatggacagtgggcccctaagctggccaggctccactactctggaagcatcaatgcctggtccactaaggagcccttctcctggatcaaagtggatctgctggcccccatgatcatccatggcattaagacccagggggccagacagaagttctcctccctctacataagccagttcattatcatgtacagcctggatgggaagaagtggcagacctacaggggcaactccactggaaccctgatggtgttctttgggaatgtggacagctcaggcatcaagcacaacatcttcaaccccccaatcattgccagatacatcaggctccaccccacccactacagcatcagatccaccctgagaatggaacttatgggctgtgacctcaactcctgtagcatgcccctgggcatggagtccaaggccatttcagatgcccaaatcactgcatcctcctacttcaccaacatgtttgccacttggagcccttccaaggccagactgcatctgcaaggcagatccaatgcctggaggccccaggtcaacaaccctaaggaatggctccaggtggacttccaaaagactatgaaagtcactggagtgaccacccagggagtgaagtccctgctgacctctatgtatgtgaaggaattcctcatctcctcaagccaagatggacaccagtggaccctgttcttccaaaatggaaaggtcaaagtgttccagggcaaccaggacagcttcacccctgtggtgaactccttggacccccccctgttgaccagatacctgaggatccacccccagtcctgggtccaccagattgccttgagaatggaggtgctgggctgtgaagcccaggacctctactaattaattaagagcatcttaccgccatttattcccatatttgttctgtttttcttgatttgggtatacatttaaatgttaataaaacaaaatggtggggcaatcatttacatttttagggatatgtaattactagttcaggtgtattgccacaagacaaacatgttaagaaactttcccgttatttacgctctgttcctgttaatcaacctctggattacaaaatttgtgaaagattgactgatattcttaactatgttgctccttttacgctgtgtggatatgctgctttatagcctctgtatctagctattgcttcccgtacggctttcgttttctcctccttgtataaatcctggttgctgtctcttttagaggagttgtggcccgttgtccgtcaacgtggcgtggtgtgctctgtgtttgctgacgcaacccccactggctggggcattgccaccacctgtcaactcctttctgggactttcgctttccccctcccgatcgccacggcagaactcatcgccgcctgccttgcccgctgctggacaggggctaggttgctgggcactgataattccgtggtgttgtctgtgccttctagttgccagccatctgttgtttgcccctcccccgtgccttccttgaccctggaaggtgccactcccactgtcctttcctaataaaatgaggaaattgcatcgcattgtctgagtaggtgtcattctattctggggggtggggtggggcaggacagcaagggggaggattgggaagacaatagcaggcatgctggggatgcggtgggctctatggctctagagcatggctacgtagataagtagcatggcgggttaatcattaactacacctgcaggaggaacccctagtgatggagttggccactccctctctgcgcgctcgctcgctcactgaggccgggcgaccaaaggtcgcccgacgcccgggcggcctcagtgagcgagcgagcgcgcagctgcctgcagg

SEQ ID NO: 474 - DNA, 6393 bp, Artificial Sequence
  Description of Artificial Sequence: Synthetic polynucleotide
cctgcaggcagctgcgcgctcgctcgctcactgaggccgcccgggcaaagcccgggcgtcgggcgacctttggtcgcccggcctcagtgagcgagcgagcgcgcagagagggagtggccaactccatcactaggggttccttgtagttaatgattaacccgccatgctacttatcgcggccgcaggctcagaggcacacaggagtttctgggctcaccctgcccccttccaacccctcagttcccatcctccagcagctgtttgtgtgctgcctctgaagtccacactgaacaaacttcagcctactcatgtccctaaaatgggcaaacattgcaagcagcaaacagcaaacacacagccctccctgcctgctgaccttggagctggggcagaggtcagagacctctctgggcccatgccacctccaacatccactcgaccccttggaatttcggtggagaggagcagaggttgtcctggcgtggtttaggtagtgtgagagggtccgggttcaaaaccacttgctgggtggggagtcgtcagtaagtggctatgccccgaccccgaagcctgtttccccatctgtacaatggaaatgataaagacgcccatctgatagggtttttgtggcaaataaacatttggtttttttgttttgttttgttttgttttttgagatggaggtttgctctgtcgcccaggctggagtgcagtgacacaatctcatctcaccacaaccttcccctgcctcagcctcccaagtagctgggattacaagcatgtgccaccacacctggctaattttctatttttagtagagacgggtttctccatgttggtcagcctcagcctcccaagtaactgggattacaggcctgtgccaccacacccggctaattttttctatttttgacagggacggggtttcaccatgttggtcaggctggtctagaggtactggatcttgctaccagtggaacagccactaaggattctgcagtgagagcagagggccagctaagtggtactctcccagagactgtctgactcacgccaccccctccaccttggacacaggacgctgtggtttctgagccaggtacaatgactcctttcggtaagtgcagtggaagctgtacactgcccaggcaaagcgtccgggcagcgtaggcgggcgactcagatcccagccagtggacttagcccctgtttgctcctccgataactggggtgaccttggttaatattcaccagcagcctcccccgttgcccctctggatccactgcttaaatacggacgaggacagggccctgtctcctcagcttcaggcaccaccactgacctgggacagtgaataattactctaaggtaaatataaaatttttaagtgtataatgtgttaaactactgattctaattgtttctctcttttagattccaacctttggaactgagtttaaaccgcagccaccatgcagattgaactctccacctgtttcttcctgtgcctgctgagattctgcttcagtgccaccaggaggtactacttgggtgcagtggagctctcctgggactacatgcagtcagacctgggagagctccctgtggatgccaggttccctccaagggtccctaaatccttccccttcaacacctcagtggtgtacaagaaaaccctgtttgtggaattcactgaccacctgttcaacattgccaagcccaggccaccctggatggggctcctgggcccaaccatccaagctgaagtgtatgacactgtggtcatcaccctcaagaacatggcctcccaccctgtctccctgcatgctgtgggagtgtcctactggaaggcctcagagggggctgagtatgatgaccagacctcccagagggaaaaggaagatgacaaggtgttcccaggaggatcccacacctatgtgtggcaagtcctgaaggaaaatggtcccatggcatcagaccccttgtgcttgacctactcctacctgagccatgtggacctggtcaaggacctgaactcaggccttattggagccctgcttgtatgcagagagggcagcctggccaaggaaaagacccagaccctgcacaagttcatcctcctgtttgctgtgtttgatgaaggaaagtcctggcactcagagactaagaacagcctgatgcaggacagggatgcagcatcagccagagcctggcccaagatgcacactgtgaatggatatgtgaacaggtccctccctggactaattggatgccacagaaagtctgtgtactggcatgtcattggaatgggcacaacccctgaagtgcatagcatcttcctggaaggacacaccttcctggtcaggaaccacagacaggcatccctggagatctccccaatcaccttcctgactgcccagactctcctgatggacctgggacagttcttgcttttctgccacatctcctcccaccaacatgatggcatggaagcctatgtgaaggtggactcctgccctgaggaacctcaactgaggatgaaaaacaatgaagaagctgaagattatgatgatgacctgactgactcagagatggatgttgtcagatttgatgatgacaacagccctagcttcatccagattagatctgtggccaagaagcaccccaagacctgggtgcactacattgctgctgaggaagaggactgggactatgcccccctggtgctggcccctgatgacagatcctacaagtcccagtacctgaacaatggtccccagagaattgggagaaagtacaagaaagtcagattcatggcctacactgatgaaaccttcaagactagagaagccatccagcatgagtcaggcattctgggtcccctgctgtatggggaagttggtgacaccctgctgatcatcttcaagaaccaagccagcaggccttacaacatctacccccatggaattacagatgtcaggccactgtactccaggagactgcctaagggagtcaagcacctcaaggacttccccatcctgcctggagaaatcttcaagtacaagtggactgtgactgtggaggatgggcctaccaagtcagaccctagatgcctgactaggtactactccagctttgtcaacatggagagagacttggcctcaggactcattggtccactgcttatttgctacaaggagtcagtggaccagagaggaaaccaaatcatgtctgacaagagaaatgtcatcctgttctcagtctttgatgagaacaggtcctggtacctgactgaaaacatccagagattcctgcccaaccctgctggggtgcaactggaggaccctgagttccaggcctcaaacataatgcacagcatcaatggctatgtctttgactccctgcaactgtcagtgtgcttgcatgaagtggcctactggtacatcctctccattggggcccagactgacttcctgtcagtgtttttctctggctacaccttcaagcataaaatggtgtatgaggacaccctcaccctgttccccttctctggagagactgtgttcatgagcatggaaaacccaggcctctggatccttggctgtcacaactcagacttcagaaacaggggcatgactgccctgcttaaggtgtccagctgtgacaagaacactggggactactatgaggactcctatgaggacatcagtgcctaccttctgtccaagaacaatgccattgaacctaggagcttcagccagaactccaggcacccaagcaccaggcagaagcagttcaatgccaccaccatccctgagaacactaccctgcaatcagaccaagaagaaattgactatgatgacaccatctcagtggagatgaagaaggaggactttgacatctatgatgaagatgaaaaccaaagccccagatccttccagaaaaagaccaggcactacttcattgcagcagtggagagattatgggactatgggatgtccagctcccctcatgtgctgagaaacagagcacagtctggctcagtgccccagttcaagaaggtggtgttccaggagttcactgatggttccttcacccaaccattgtacaggggagagctgaatgagcacctgggcctgttgggcccatacatcagagcagaagtggaggacaacatcatggtcaccttcagaaaccaggcctccagaccctactccttctactcctccctgatctcctatgaagaggaccaaagacagggagctgagcccagaaagaactttgtgaagccaaatgaaaccaagacctacttctggaaagtgcagcaccacatggcccccaccaaggatgagtttgactgcaaagcttgggcctacttcagtgatgtggacttggagaaggatgtgcactcaggtcttattggccctctgcttgtgtgccataccaacactcttaaccctgcacatggcagacaagtcactgtgcaggagtttgccctcttcttcaccatctttgatgaaacaaagtcctggtacttcacagaaaacatggaaaggaactgcagagccccttgcaacatccagatggaggaccccaccttcaaggaaaactacaggtttcatgccatcaatgggtacatcatggacaccctgcctggactggtcatggcccaggaccagaggatcagatggtatctgctcagcatgggaagcaatgagaacatccactccattcacttcagtggtcatgtgttcactgtcaggaaaaaggaggagtacaagatggccctctacaacctttaccctggagtgtttgaaactgtggaaatgctgccatccaaggctggcatctggagggtggaatgcctcattggtgaacacctccatgctggaatgtccaccctcttcctggtgtacagcaacaagtgccagacccccctgggaatggcttcagggcacatcagagacttccagatcactgcctctgggcagtatggacagtgggcccctaagctggccaggctccactactctggaagcatcaatgcctggtccactaaggagcccttctcctggatcaaagtggatctgctggcccccatgatcatccatggcattaagacccagggggccagacagaagttctcctccctctacataagccagttcattatcatgtacagcctggatgggaagaagtggcagacctacaggggcaactccactggaaccctgatggtgttctttgggaatgtggacagctcaggcatcaagcacaacatcttcaaccccccaatcattgccagatacatcaggctccaccccacccactacagcatcagatccaccctgagaatggaacttatgggctgtgacctcaactcctgtagcatgcccctgggcatggagtccaaggccatttcagatgcccaaatcactgcatcctcctacttcaccaacatgtttgccacttggagcccttccaaggccagactgcatctgcaaggcagatccaatgcctggaggccccaggtcaacaaccctaaggaatggctccaggtggacttccaaaagactatgaaagtcactggagtgaccacccagggagtgaagtccctgctgacctctatgtatgtgaaggaattcctcatctcctcaagccaagatggacaccagtggaccctgttcttccaaaatggaaaggtcaaagtgttccagggcaaccaggacagcttcacccctgtggtgaactccttggacccccccctgttgaccagatacctgaggatccacccccagtcctgggtccaccagattgccttgagaatggaggtgctgggctgtgaagcccaggacctctactaattaattaagctcgctttcttgctgtccaatttctattaaaggttcctttgttccctaagtccaactactaaactgggggatattatgaagggccttgagcatctggattctgcctcagacatgataagatacattgatgagtttggacaaaccacaactagaatgcagtgaaaaaaatgctttatttgtgaaatttgtgatgctattgctttatttgtaaccattataagctgcaataaacaagttaacaacaacaattgcattcattttatgtttcaggttcagggggagatgtgggaggttttttaaagcaagtaaaacctctacaaatgtggtatctagagcatggctacgtagataagtagcatggcgggttaatcattaactacacctgcaggaggaacccctagtgatggagttggccactccctctctgcgcgctcgctcgctcactgaggccgggcgaccaaaggtcgcccgacgcccgggcggcctcagtgagcgagcgagcgcgcagctgcctgcagg

SEQ ID NO: 475 - DNA, 6390 bp, Artificial Sequence
  Description of Artificial Sequence: Synthetic polynucleotide
cctgcaggcagctgcgcgctcgctcgctcactgaggccgcccgggcaaagcccgggcgtcgggcgacctttggtcgcccggcctcagtgagcgagcgagcgcgcagagagggagtggccaactccatcactaggggttccttgtagttaatgattaacccgccatgctacttatcgcggccgcaggctcagaggcacacaggagtttctgggctcaccctgcccccttccaacccctcagttcccatcctccagcagctgtttgtgtgctgcctctgaagtccacactgaacaaacttcagcctactcatgtccctaaaatgggcaaacattgcaagcagcaaacagcaaacacacagccctccctgcctgctgaccttggagctggggcagaggtcagagacctctctgggcccatgccacctccaacatccactcgaccccttggaatttcggtggagaggagcagaggttgtcctggcgtggtttaggtagtgtgagagggtccgggttcaaaaccacttgctgggtggggagtcgtcagtaagtggctatgccccgaccccgaagcctgtttccccatctgtacaatggaaatgataaagacgcccatctgatagggtttttgtggcaaataaacatttggtttttttgttttgttttgttttgttttttgagatggaggtttgctctgtcgcccaggctggagtgcagtgacacaatctcatctcaccacaaccttcccctgcctcagcctcccaagtagctgggattacaagcatgtgccaccacacctggctaattttctatttttagtagagacgggtttctccatgttggtcagcctcagcctcccaagtaactgggattacaggcctgtgccaccacacccggctaattttttctatttttgacagggacggggtttcaccatgttggtcaggctggtctagaggtactggatcttgctaccagtggaacagccactaaggattctgcagtgagagcagagggccagctaagtggtactctcccagagactgtctgactcacgccaccccctccaccttggacacaggacgctgtggtttctgagccaggtacaatgactcctttcggtaagtgcagtggaagctgtacactgcccaggcaaagcgtccgggcagcgtaggcgggcgactcagatcccagccagtggacttagcccctgtttgctcctccgataactggggtgaccttggttaatattcaccagcagcctcccccgttgcccctctggatccactgcttaaatacggacgaggacagggccctgtctcctcagcttcaggcaccaccactgacctgggacagtgaataattactctaaggtaaatataaaatttttaagtgtataatgtgttaaactactgattctaattgtttctctcttttagattccaacctttggaactgagtttaaacagccaccatgcagattgaactctccacctgtttcttcctgtgcctgctgagattctgcttcagtgccaccaggaggtactacttgggtgcagtggagctctcctgggactacatgcagtcagacctgggagagctccctgtggatgccaggttccctccaagggtccctaaatccttccccttcaacacctcagtggtgtacaagaaaaccctgtttgtggaattcactgaccacctgttcaacattgccaagcccaggccaccctggatggggctcctgggcccaaccatccaagctgaagtgtatgacactgtggtcatcaccctcaagaacatggcctcccaccctgtctccctgcatgctgtgggagtgtcctactggaaggcctcagagggggctgagtatgatgaccagacctcccagagggaaaaggaagatgacaaggtgttcccaggaggatcccacacctatgtgtggcaagtcctgaaggaaaatggtcccatggcatcagaccccttgtgcttgacctactcctacctgagccatgtggacctggtcaaggacctgaactcaggccttattggagccctgcttgtatgcagagagggcagcctggccaaggaaaagacccagaccctgcacaagttcatcctcctgtttgctgtgtttgatgaaggaaagtcctggcactcagagactaagaacagcctgatgcaggacagggatgcagcatcagccagagcctggcccaagatgcacactgtgaatggatatgtgaacaggtccctccctggactaattggatgccacagaaagtctgtgtactggcatgtcattggaatgggcacaacccctgaagtgcatagcatcttcctggaaggacacaccttcctggtcaggaaccacagacaggcatccctggagatctccccaatcaccttcctgactgcccagactctcctgatggacctgggacagttcttgcttttctgccacatctcctcccaccaacatgatggcatggaagcctatgtgaaggtggactcctgccctgaggaacctcaactgaggatgaaaaacaatgaagaagctgaagattatgatgatgacctgactgactcagagatggatgttgtcagatttgatgatgacaacagccctagcttcatccagattagatctgtggccaagaagcaccccaagacctgggtgcactacattgctgctgaggaagaggactgggactatgcccccctggtgctggcccctgatgacagatcctacaagtcccagtacctgaacaatggtccccagagaattgggagaaagtacaagaaagtcagattcatggcctacactgatgaaaccttcaagactagagaagccatccagcatgagtcaggcattctgggtcccctgctgtatggggaagttggtgacaccctgctgatcatcttcaagaaccaagccagcaggccttacaacatctacccccatggaattacagatgtcaggccactgtactccaggagactgcctaagggagtcaagcacctcaaggacttccccatcctgcctggagaaatcttcaagtacaagtggactgtgactgtggaggatgggcctaccaagtcagaccctagatgcctgactaggtactactccagctttgtcaacatggagagagacttggcctcaggactcattggtccactgcttatttgctacaaggagtcagtggaccagagaggaaaccaaatcatgtctgacaagagaaatgtcatcctgttctcagtctttgatgagaacaggtcctggtacctgactgaaaacatccagagattcctgcccaaccctgctggggtgcaactggaggaccctgagttccaggcctcaaacataatgcacagcatcaatggctatgtctttgactccctgcaactgtcagtgtgcttgcatgaagtggcctactggtacatcctctccattggggcccagactgacttcctgtcagtgtttttctctggctacaccttcaagcataaaatggtgtatgaggacaccctcaccctgttccccttctctggagagactgtgttcatgagcatggaaaacccaggcctctggatccttggctgtcacaactcagacttcagaaacaggggcatgactgccctgcttaaggtgtccagctgtgacaagaacactggggactactatgaggactcctatgaggacatcagtgcctaccttctgtccaagaacaatgccattgaacctaggagcttcagccagaactccaggcacccaagcaccaggcagaagcagttcaatgccaccaccatccctgagaacactaccctgcaatcagaccaagaagaaattgactatgatgacaccatctcagtggagatgaagaaggaggactttgacatctatgatgaagatgaaaaccaaagccccagatccttccagaaaaagaccaggcactacttcattgcagcagtggagagattatgggactatgggatgtccagctcccctcatgtgctgagaaacagagcacagtctggctcagtgccccagttcaagaaggtggtgttccaggagttcactgatggttccttcacccaaccattgtacaggggagagctgaatgagcacctgggcctgttgggcccatacatcagagcagaagtggaggacaacatcatggtcaccttcagaaaccaggcctccagaccctactccttctactcctccctgatctcctatgaagaggaccaaagacagggagctgagcccagaaagaactttgtgaagccaaatgaaaccaagacctacttctggaaagtgcagcaccacatggcccccaccaaggatgagtttgactgcaaagcttgggcctacttcagtgatgtggacttggagaaggatgtgcactcaggtcttattggccctctgcttgtgtgccataccaacactcttaaccctgcacatggcagacaagtcactgtgcaggagtttgccctcttcttcaccatctttgatgaaacaaagtcctggtacttcacagaaaacatggaaaggaactgcagagccccttgcaacatccagatggaggaccccaccttcaaggaaaactacaggtttcatgccatcaatgggtacatcatggacaccctgcctggactggtcatggcccaggaccagaggatcagatggtatctgctcagcatgggaagcaatgagaacatccactccattcacttcagtggtcatgtgttcactgtcaggaaaaaggaggagtacaagatggccctctacaacctttaccctggagtgtttgaaactgtggaaatgctgccatccaaggctggcatctggagggtggaatgcctcattggtgaacacctccatgctggaatgtccaccctcttcctggtgtacagcaacaagtgccagacccccctgggaatggcttcagggcacatcagagacttccagatcactgcctctgggcagtatggacagtgggcccctaagctggccaggctccactactctggaagcatcaatgcctggtccactaaggagcccttctcctggatcaaagtggatctgctggcccccatgatcatccatggcattaagacccagggggccagacagaagttctcctccctctacataagccagttcattatcatgtacagcctggatgggaagaagtggcagacctacaggggcaactccactggaaccctgatggtgttctttgggaatgtggacagctcaggcatcaagcacaacatcttcaaccccccaatcattgccagatacatcaggctccaccccacccactacagcatcagatccaccctgagaatggaacttatgggctgtgacctcaactcctgtagcatgcccctgggcatggagtccaaggccatttcagatgcccaaatcactgcatcctcctacttcaccaacatgtttgccacttggagcccttccaaggccagactgcatctgcaaggcagatccaatgcctggaggccccaggtcaacaaccctaaggaatggctccaggtggacttccaaaagactatgaaagtcactggagtgaccacccagggagtgaagtccctgctgacctctatgtatgtgaaggaattcctcatctcctcaagccaagatggacaccagtggaccctgttcttccaaaatggaaaggtcaaagtgttccagggcaaccaggacagcttcacccctgtggtgaactccttggacccccccctgttgaccagatacctgaggatccacccccagtcctgggtccaccagattgccttgagaatggaggtgctgggctgtgaagcccaggacctctactaattaattaagctcgctttcttgctgtccaatttctattaaaggttcctttgttccctaagtccaactactaaactgggggatattatgaagggccttgagcatctggattctgcctcagacatgataagatacattgatgagtttggacaaaccacaactagaatgcagtgaaaaaaatgctttatttgtgaaatttgtgatgctattgctttatttgtaaccattataagctgcaataaacaagttaacaacaacaattgcattcattttatgtttcaggttcagggggagatgtgggaggttttttaaagcaagtaaaacctctacaaatgtggtatctagagcatggctacgtagataagtagcatggcgggttaatcattaactacacctgcaggaggaacccctagtgatggagttggccactccctctctgcgcgctcgctcgctcactgaggccgggcgaccaaaggtcgcccgacgcccgggcggcctcagtgagcgagcgagcgcgcagctgcctgcagg

SEQ ID NO: 476 - DNA, 6393 bp, Artificial Sequence; identical to SEQ ID NO: 474
  Description of Artificial Sequence: Synthetic polynucleotide

SEQ ID NO: 477 - DNA, 6392 bp, Artificial Sequence
  Description of Artificial Sequence: Synthetic polynucleotide
cctgcaggcagctgcgcgctcgctcgctcactgaggccgcccgggcaaagcccgggcgtcgggcgacctttggtcgcccggcctcagtgagcgagcgagcgcgcagagagggagtggccaactccatcactaggggttccttgtagttaatgattaacccgccatgctacttatcgcggccgcaggctcagaggcacacaggagtttctgggctcaccctgcccccttccaacccctcagttcccatcctccagcagctgtttgtgtgctgcctctgaagtccacactgaacaaacttcagcctactcatgtccctaaaatgggcaaacattgcaagcagcaaacagcaaacacacagccctccctgcctgctgaccttggagctggggcagaggtcagagacctctctgggcccatgccacctccaacatccactcgaccccttggaatttcggtggagaggagcagaggttgtcctggcgtggtttaggtagtgtgagagggtccgggttcaaaaccacttgctgggtggggagtcgtcagtaagtggctatgccccgaccccgaagcctgtttccccatctgtacaatggaaatgataaagacgcccatctgatagggtttttgtggcaaataaacatttggtttttttgttttgttttgttttgttttttgagatggaggtttgctctgtcgcccaggctggagtgcagtgacacaatctcatctcaccacaaccttcccctgcctcagcctcccaagtagctgggattacaagcatgtgccaccacacctggctaattttctatttttagtagagacgggtttctccatgttggtcagcctcagcctcccaagtaactgggattacaggcctgtgccaccacacccggctaattttttctatttttgacagggacggggtttcaccatgttggtcaggctggtctagaggtactggatcttgctaccagtggaacagccactaaggattctgcagtgagagcagagggccagctaagtggtactctcccagagactgtctgactcacgccaccccctccaccttggacacaggacgctgtggtttctgagccaggtacaatgactcctttcggtaagtgcagtggaagctgtacactgcccaggcaaagcgtccgggcagcgtaggcgggcgactcagatcccagccagtggacttagcccctgtttgctcctccgataactggggtgaccttggttaatattcaccagcagcctcccccgttgcccctctggatccactgcttaaatacggacgaggacagggccctgtctcctcagcttcaggcaccaccactgacctgggacagtgaataattactctaaggtaaatataaaatttttaagtgtataatgtgttaaactactgattctaattgtttctctcttttagattccaacctttggaactgagtttaaacgccgccaccatgcagattgaactctccacctgtttcttcctgtgcctgctgagattctgcttcagtgccaccaggaggtactacttgggtgcagtggagctctcctgggactacatgcagtcagacctgggagagctccctgtggatgccaggttccctccaagggtccctaaatccttccccttcaacacctcagtggtgtacaagaaaaccctgtttgtggaattcactgaccacctgttcaacattgccaagcccaggccaccctggatggggctcctgggcccaaccatccaagctgaagtgtatgacactgtggtcatcaccctcaagaacatggcctcccaccctgtctccctgcatgctgtgggagtgtcctactggaaggcctcagagggggctgagtatgatgaccagacctcccagagggaaaaggaagatgacaaggtgttcccaggaggatcccacacctatgtgtggcaagtcctgaaggaaaatggtcccatggcatcagaccccttgtgcttgacctactcctacctgagccatgtggacctggtcaaggacctgaactcaggccttattggagccctgcttgtatgcagagagggcagcctggccaaggaaaagacccagaccctgcacaagttcatcctcctgtttgctgtgtttgatgaaggaaagtcctggcactcagagactaagaacagcctgatgcaggacagggatgcagcatcagccagagcctggcccaagatgcacactgtgaatggatatgtgaacaggtccctccctggactaattggatgccacagaaagtctgtgtactggcatgtcattggaatgggcacaacccctgaagtgcatagcatcttcctggaaggacacaccttcctggtcaggaaccacagacaggcatccctggagatctccccaatcaccttcctgactgcccagactctcctgatggacctgggacagttcttgcttttctgccacatctcctcccaccaacatgatggcatggaagcctatgtgaaggtggactcctgccctgaggaacctcaactgaggatgaaaaacaatgaagaagctgaagattatgatgatgacctgactgactcagagatggatgttgtcagatttgatgatgacaacagccctagcttcatccagattagatctgtggccaagaagcaccccaagacctgggtgcactacattgctgctgaggaagaggactgggactatgcccccctggtgctggcccctgatgacagatcctacaagtcccagtacctgaacaatggtccccagagaattgggagaaagtacaagaaagtcagattcatggcctacactgatgaaaccttcaagactagagaagccatccagcatgagtcaggcattctgggtcccctgctgtatggggaagttggtgacaccctgctgatcatcttcaagaaccaagccagcaggccttacaacatctacccccatggaattacagatgtcaggccactgtactccaggagactgcctaagggagtcaagcacctcaaggacttccccatcctgcctggagaaatcttcaagtacaagtggactgtgactgtggaggatgggcctaccaagtcagaccctagatgcctgactaggtactactccagctttgtcaacatggagagagacttggcctcaggactcattggtccactgcttatttgctacaaggagtcagtggaccagagaggaaaccaaatcatgtctgacaagagaaatgtcatcctgttctcagtctttgatgagaacaggtcctggtacctgactgaaaacatccagagattcctgcccaaccctgctggggtgcaactggaggaccctgagttccaggcctcaaacataatgcacagcatcaatggctatgtctttgactccctgcaactgtcagtgtgcttgcatgaagtggcctactggtacatcctctccattggggcccagactgacttcctgtcagtgtttttctctggctacaccttcaagcataaaatggtgtatgaggacaccctcaccctgttccccttctctggagagactgtgttcatgagcatggaaaacccaggcctctggatccttggctgtcacaactcagacttcagaaacaggggcatgactgccctgcttaaggtgtccagctgtgacaagaacactggggactactatgaggactcctatgaggacatcagtgcctaccttctgtccaagaacaatgccattgaacctaggagcttcagccagaactccaggcacccaagcaccaggcagaagcagttcaatgccaccaccatccctgagaacactaccctgcaatcagaccaagaagaaattgactatgatgacaccatctcagtggagatgaagaaggaggactttgacatctatgatgaagatgaaaaccaaagccccagatccttccagaaaaagaccaggcactacttcattgcagcagtggagagattatgggactatgggatgtccagctcccctcatgtgctgagaaacagagcacagtctggctcagtgccccagttcaagaaggtggtgttccaggagttcactgatggttccttcacccaaccattgtacaggggagagctgaatgagcacctgggcctgttgggcccatacatcagagcagaagtggaggacaacatcatggtcaccttcagaaaccaggcctccagaccctactccttctactcctccctgatctcctatgaagaggaccaaagacagggagctgagcccagaaagaactttgtgaagccaaatgaaaccaagacctacttctggaaagtgcagcaccacatggcccccaccaaggatgagtttgactgcaaagcttgggcctacttcagtgatgtggacttggagaaggatgtgcactcaggtcttattggccctctgcttgtgtgccataccaacactcttaaccctgcacatggcagacaagtcactgtgcaggagtttgccctcttcttcaccatctttgatgaaacaaagtcctggtacttcacagaaaacatggaaaggaactgcagagccccttgcaacatccagatggaggaccccaccttcaaggaaaactacaggtttcatgccatcaatgggtacatcatggacaccctgcctggactggtcatggcccaggaccagaggatcagatggtatctgctcagcatgggaagcaatgagaacatccactccattcacttcagtggtcatgtgttcactgtcaggaaaaaggaggagtacaagatggccctctacaacctttaccctggagtgtttgaaactgtggaaatgctgccatccaaggctggcatctggagggtggaatgcctcattggtgaacacctccatgctggaatgtccaccctcttcctggtgtacagcaacaagtgccagacccccctgggaatggcttcagggcacatcagagacttccagatcactgcctctgggcagtatggacagtgggcccctaagctggccaggctccactactctggaagcatcaatgcctggtccactaaggagcccttctcctggatcaaagtggatctgctggcccccatgatcatccatggcattaagacccagggggccagacagaagttctcctccctctacataagccagttcattatcatgtacagcctggatgggaagaagtggcagacctacaggggcaactccactggaaccctgatggtgttctttgggaatgtggacagctcaggcatcaagcacaacatcttcaaccccccaatcattgccagatacatcaggctccaccccacccactacagcatcagatccaccctgagaatggaacttatgggctgtgacctcaactcctgtagcatgcccctgggcatggagtccaaggccatttcagatgcccaaatcactgcatcctcctacttcaccaacatgtttgccacttggagcccttccaaggccagactgcatctgcaaggcagatccaatgcctggaggccccaggtcaacaaccctaaggaatggctccaggtggacttccaaaagactatgaaagtcactggagtgaccacccagggagtgaagtccctgctgacctctatgtatgtgaaggaattcctcatctcctcaagccaagatggacaccagtggaccctgttcttccaaaatggaaaggtcaaagtgttccagggcaaccaggacagcttcacccctgtggtgaactccttggacccccccctgttgaccagatacctgaggatccacccccagtcctgggtccaccagattgccttgagaatggaggtgctgggctgtgaagcccaggacctctactaattaattaagctcgctttcttgctgtccaatttctattaaaggttcctttgttccctaagtccaactactaaactgggggatattatgaagggccttgagcatctggattctgcctcagacatgataagatacattgatgagtttggacaaaccacaactagaatgcagtgaaaaaaatgctttatttgtgaaatttgtgatgctattgctttatttgtaaccattataagctgcaataaacaagttaacaacaacaattgcattcattttatgtttcaggttcagggggagatgtgggaggttttttaaagcaagtaaaacctctacaaatgtggtatctagagcatggctacgtagataagtagcatggcgggttaatcattaactacacctgcaggaggaacccctagtgatggagttggccactccctctctgcgcgctcgctcgctcactgaggccgggcgaccaaaggtcgcccgacgcccgggcggcctcagtgagcgagcgagcgcgcagctgcctgcagg

SEQ ID NO: 478 - DNA, 6378 bp, Artificial Sequence
  Description of Artificial Sequence: Synthetic polynucleotide
cctgcaggcagctgcgcgctcgctcgctcactgaggccgcccgggcaaagcccgggcgtcgggcgacctttggtcgcccggcctcagtgagcgagcgagcgcgcagagagggagtggccaactccatcactaggggttccttgtagttaatgattaacccgccatgctacttatcgcggccgcaggctcagaggcacacaggagtttctgggctcaccctgcccccttccaacccctcagttcccatcctccagcagctgtttgtgtgctgcctctgaagtccacactgaacaaacttcagcctactcatgtccctaaaatgggcaaacattgcaagcagcaaacagcaaacacacagccctccctgcctgctgaccttggagctggggcagaggtcagagacctctctgggcccatgccacctccaacatccactcgaccccttggaatttcggtggagaggagcagaggttgtcctggcgtggtttaggtagtgtgagagggtccgggttcaaaaccacttgctgggtggggagtcgtcagtaagtggctatgccccgaccccgaagcctgtttccccatctgtacaatggaaatgataaagacgcccatctgatagggtttttgtggcaaataaacatttggtttttttgttttgttttgttttgttttttgagatggaggtttgctctgtcgcccaggctggagtgcagtgacacaatctcatctcaccacaaccttcccctgcctcagcctcccaagtagctgggattacaagcatgtgccaccacacctggctaattttctatttttagtagagacgggtttctccatgttggtcagcctcagcctcccaagtaactgggattacaggcctgtgccaccacacccggctaattttttctatttttgacagggacggggtttcaccatgttggtcaggctggtctagaggtactggatcttgctaccagtggaacagccactaaggattctgcagtgagagcagagggccagctaagtggtactctcccagagactgtctgactcacgccaccccctccaccttggacacaggacgctgtggtttctgagccaggtacaatgactcctttcggtaagtgcagtggaagctgtacactgcccaggcaaagcgtccgggcagcgtaggcgggcgactcagatcccagccagtggacttagcccctgtttgctcctccgataactggggtgaccttggttaatattcaccagcagcctcccccgttgcccctctggatccactgcttaaatacggacgaggacagggccctgtctcctcagcttcaggcaccaccactgacctgggacagtgaataattactctaaggtaaatataaaatttttaagtgtataatgtgttaaactactgattctaattgtttctctcttttagattccaacctttggaactgaaccatgcagattgaactctccacctgtttcttcctgtgcctgctgagattctgcttcagtgccaccaggaggtactacttgggtgcagtggagctctcctgggactacatgcagtcagacctgggagagctccctgtggatgccaggttccctccaagggtccctaaatccttccccttcaacacctcagtggtgtacaagaaaaccctgtttgtggaattcactgaccacctgttcaacattgccaagcccaggccaccctggatggggctcctgggcccaaccatccaagctgaagtgtatgacactgtggtcatcaccctcaagaacatggcctcccaccctgtctccctgcatgctgtgggagtgtcctactggaaggcctcagagggggctgagtatgatgaccagacctcccagagggaaaaggaagatgacaaggtgttcccaggaggatcccacacctatgtgtggcaagtcctgaaggaaaatggtcccatggcatcagaccccttgtgcttgacctactcctacctgagccatgtggacctggtcaaggacctgaactcaggccttattggagccctgcttgtatgcagagagggcagcctggccaaggaaaagacccagaccctgcacaagttcatcctcctgtttgctgtgtttgatgaaggaaagtcctggcactcagagactaagaacagcctgatgcaggacagggatgcagcatcagccagagcctggcccaagatgcacactgtgaatggatatgtgaacaggtccctccctggactaattggatgccacagaaagtctgtgtactggcatgtcattggaatgggcacaacccctgaagtgcatagcatcttcctggaaggacacaccttcctggtcaggaaccacagacaggcatccctggagatctccccaatcaccttcctgactgcccagactctcctgatggacctgggacagttcttgcttttctgccacatctcctcccaccaacatgatggcatggaagcctatgtgaaggtggactcctgccctgaggaacctcaactgaggatgaaaaacaatgaagaagctgaagattatgatgatgacctgactgactcagagatggatgttgtcagatttgatgatgacaacagccctagcttcatccagattagatctgtggccaagaagcaccccaagacctgggtgcactacattgctgctgaggaagaggactgggactatgcccccctggtgctggcccctgatgacagatcctacaagtcccagtacctgaacaatggtccccagagaattgggagaaagtacaagaaagtcagattcatggcctacactgatgaaaccttcaagactagagaagccatccagcatgagtcaggcattctgggtcccctgctgtatggggaagttggtgacaccctgctgatcatcttcaagaaccaagccagcaggccttacaacatctacccccatggaattacagatgtcaggccactgtactccaggagactgcctaagggagtcaagcacctcaaggacttccccatcctgcctggagaaatcttcaagtacaagtggactgtgactgtggaggatgggcctaccaagtcagaccctagatgcctgactaggtactactccagctttgtcaacatggagagagacttggcctcaggactcattggtccactgcttatttgctacaaggagtcagtggaccagagaggaaaccaaatcatgtctgacaagagaaatgtcatcctgttctcagtctttgatgagaacaggtcctggtacctgactgaaaacatccagagattcctgcccaaccctgctggggtgcaactggaggaccctgagttccaggcctcaaacataatgcacagcatcaatggctatgtctttgactccctgcaactgtcagtgtgcttgcatgaagtggcctactggtacatcctctccattggggcccagactgacttcctgtcagtgtttttctctggctacaccttcaagcataaaatggtgtatgaggacaccctcaccctgttccccttctctggagagactgtgttcatgagcatggaaaacccaggcctctggatccttggctgtcacaactcagacttcagaaacaggggcatgactgccctgcttaaggtgtccagctgtgacaagaacactggggactactatgaggactcctatgaggacatcagtgcctaccttctgtccaagaacaatgccattgaacctaggagcttcagccagaactccaggcacccaagcaccaggcagaagcagttcaatgccaccaccatccctgagaacactaccctgcaatcagaccaagaagaaattgactatgatgacaccatctcagtggagatgaagaaggaggactttgacatctatgatgaagatgaaaaccaaagccccagatccttccagaaaaagaccaggcactacttcattgcagcagtggagagattatgggactatgggatgtccagctcccctcatgtgctgagaaacagagcacagtctggctcagtgccccagttcaagaaggtggtgttccaggagttcactgatggttccttcacccaaccattgtacaggggagagctgaatgagcacctgggcctgttgggcccatacatcagagcagaagtggaggacaacatcatggtcaccttcagaaaccaggcctccagaccctactccttctactcctccctgatctcctatgaagaggaccaaagacagggagctgagcccagaaagaactttgtgaagccaaatgaaaccaagacctacttctggaaagtgcagcaccacatggcccccaccaaggatgagtttgactgcaaagcttgggcctacttcagtgatgtggacttggagaaggatgtgcactcaggtcttattggccctctgcttgtgtgccataccaacactcttaaccctgcacatggcagacaagtcactgtgcaggagtttgccctcttcttcaccatctttgatgaaacaaagtcctggtacttcacagaaaacatggaaaggaactgcagagccccttgcaacatccagatggaggaccccaccttcaaggaaaactacaggtttcatgccatcaatgggtacatcatggacaccctgcctggactggtcatggcccaggaccagaggatcagatggtatctgctcagcatgggaagcaatgagaacatccactccattcacttcagtggtcatgtgttcactgtcaggaaaaaggaggagtacaagatggccctctacaacctttaccctggagtgtttgaaactgtggaaatgctgccatccaaggctggcatctggagggtggaatgcctcattggtgaacacctccatgctggaatgtccaccctcttcctggtgtacagcaacaagtgccagacccccctgggaatggcttcagggcacatcagagacttccagatcactgcctctgggcagtatggacagtgggcccctaagctggccaggctccactactctggaagcatcaatgcctggtccactaaggagcccttctcctggatcaaagtggatctgctggcccccatgatcatccatggcattaagacccagggggccagacagaagttctcctccctctacataagccagttcattatcatgtacagcctggatgggaagaagtggcagacctacaggggcaactccactggaaccctgatggtgttctttgggaatgtggacagctcaggcatcaagcacaacatcttcaaccccccaatcattgccagatacatcaggctccaccccacccactacagcatcagatccaccctgagaatggaacttatgggctgtgacctcaactcctgtagcatgcccctgggcatggagtccaaggccatttcagatgcccaaatcactgcatcctcctacttcaccaacatgtttgccacttggagcccttccaaggccagactgcatctgcaaggcagatccaatgcctggaggccccaggtcaacaaccctaaggaatggctccaggtggacttccaaaagactatgaaagtcactggagtgaccacccagggagtgaagtccctgctgacctctatgtatgtgaaggaattcctcatctcctcaagccaagatggacaccagtggaccctgttcttccaaaatggaaaggtcaaagtgttccagggcaaccaggacagcttcacccctgtggtgaactccttggacccccccctgttgaccagatacctgaggatccacccccagtcctgggtccaccagattgccttgagaatggaggtgctgggctgtgaagcccaggacctctactaattaattaagctcgctttcttgctgtccaatttctattaaaggttcctttgttccctaagtccaactactaaactgggggatattatgaagggccttgagcatctggattctgcctcagacatgataagatacattgatgagtttggacaaaccacaactagaatgcagtgaaaaaaatgctttatttgtgaaatttgtgatgctattgctttatttgtaaccattataagctgcaataaacaagttaacaacaacaattgcattcattttatgtttcaggttcagggggagatgtgggaggttttttaaagcaagtaaaacctctacaaatgtggtatctagagcatggctacgtagataagtagcatggcgggttaatcattaactacacctgcaggaggaacccctagtgatggagttggccactccctctctgcgcgctcgctcgctcactgaggccgggcgaccaaaggtcgcccgacgcccgggcggcctcagtgagcgagcgagcgcgcagctgcctgcagg

SEQ ID NO: 479 - DNA, 6283 bp, Artificial Sequence
  Description of Artificial Sequence: Synthetic polynucleotide
cctgcaggcagctgcgcgctcgctcgctcactgaggccgcccgggcaaagcccgggcgtcgggcgacctttggtcgcccggcctcagtgagcgagcgagcgcgcagagagggagtggccaactccatcactaggggttccttgtagttaatgattaacccgccatgctacttatcgcggccgcaggctcagaggcacacaggagtttctgggctcaccctgcccccttccaacccctcagttcccatcctccagcagctgtttgtgtgctgcctctgaagtccacactgaacaaacttcagcctactcatgtccctaaaatgggcaaacattgcaagcagcaaacagcaaacacacagccctccctgcctgctgaccttggagctggggcagaggtcagagacctctctgggcccatgccacctccaacatccactcgaccccttggaatttcggtggagaggagcagaggttgtcctggcgtggtttaggtagtgtgagagggtccgggttcaaaaccacttgctgggtggggagtcgtcagtaagtggctatgccccgaccccgaagcctgtttccccatctgtacaatggaaatgataaagacgcccatctgatagggtttttgtggcaaataaacatttggtttttttgttttgttttgttttgttttttgagatggaggtttgctctgtcgcccaggctggagtgcagtgacacaatctcatctcaccacaaccttcccctgcctcagcctcccaagtagctgggattacaagcatgtgccaccacacctggctaattttctatttttagtagagacgggtttctccatgttggtcagcctcagcctcccaagtaactgggattacaggcctgtgccaccacacccggctaattttttctatttttgacagggacggggtttcaccatgttggtcaggctggtctagaggtactggatcttgctaccagtggaacagccactaaggattctgcagtgagagcagagggccagctaagtggtactctcccagagactgtctgactcacgccaccccctccaccttggacacaggacgctgtggtttctgagccaggtacaatgactcctttcggtaagtgcagtggaagctgtacactgcccaggcaaagcgtccgggcagcgtaggcgggcgactcagatcccagccagtggacttagcccctgtttgctcctccgataactggggtgaccttggttaatattcaccagcagcctcccccgttgcccctctggatccactgcttaaatacggacgaggacagggccctgtctcctcagcttcaggcaccaccactgacctgggacagtgaataattactctaaggtaaatataaaatttttaagtgtataatgtgttaaactactgattctaattgtttctctcttttagattccaacctttggaactgagtttaaacagccaccatgcagattgaactctccacctgtttcttcctgtgcctgctgagattctgcttcagtgccaccaggaggtactacttgggtgcagtggagctctcctgggactacatgcagtcagacctgggagagctccctgtggatgccaggttccctccaagggtccctaaatccttccccttcaacacctcagtggtgtacaagaaaaccctgtttgtggaattcactgaccacctgttcaacattgccaagcccaggccaccctggatggggctcctgggcccaaccatccaagctgaagtgtatgacactgtggtcatcaccctcaagaacatggcctcccaccctgtctccctgcatgctgtgggagtgtcctactggaaggcctcagagggggctgagtatgatgaccagacctcccagagggaaaaggaagatgacaaggtgttcccaggaggatcccacacctatgtgtggcaagtcctgaaggaaaatggtcccatggcatcagaccccttgtgcttgacctactcctacctgagccatgtggacctggtcaaggacctgaactcaggccttattggagccctgcttgtatgcagagagggcagcctggccaaggaaaagacccagaccctgcacaagttcatcctcctgtttgctgtgtttgatgaaggaaagtcctggcactcagagactaagaacagcctgatgcaggacagggatgcagcatcagccagagcctggcccaagatgcacactgtgaatggatatgtgaacaggtccctccctggactaattggatgccacagaaagtctgtgtactggcatgtcattggaatgggcacaacccctgaagtgcatagcatcttcctggaaggacacaccttcctggtcaggaaccacagacaggcatccctggagatctccccaatcaccttcctgactgcccagactctcctgatggacctgggacagttcttgcttttctgccacatctcctcccaccaacatgatggcatggaagcctatgtgaaggtggactcctgccctgaggaacctcaactgaggatgaaaaacaatgaagaagctgaagattatgatgatgacctgactgactcagagatggatgttgtcagatttgatgatgacaacagccctagcttcatccagattagatctgtggccaagaagcaccccaagacctgggtgcactacattgctgctgaggaagaggactgggactatgcccccctggtgctggcccctgatgacagatcctacaagtcccagtacctgaacaatggtccccagagaattgggagaaagtacaagaaagtcagattcatggcctacactgatgaaaccttcaagactagagaagccatccagcatgagtcaggcattctgggtcccctgctgtatggggaagttggtgacaccctgctgatcatcttcaagaaccaagccagcaggccttacaacatctacccccatggaattacagatgtcaggccactgtactccaggagactgcctaagggagtcaagcacctcaaggacttccccatcctgcctggagaaatcttcaagtacaagtggactgtgactgtggaggatgggcctaccaagtcagaccctagatgcctgactaggtactactccagctttgtcaacatggagagagacttggcctcaggactcattggtccactgcttatttgctacaaggagtcagtggaccagagaggaaaccaaatcatgtctgacaagagaaatgtcatcctgttctcagtctttgatgagaacaggtcctggtacctgactgaaaacatccagagattcctgcccaaccctgctggggtgcaactggaggaccctgagttccaggcctcaaacataatgcacagcatcaatggctatgtctttgactccctgcaactgtcagtgtgcttgcatgaagtggcctactggtacatcctctccattggggcccagactgacttcctgtcagtgtttttctctggctacaccttcaagcataaaatggtgtatgaggacaccctcaccctgttccccttctctggagagactgtgttcatgagcatggaaaacccaggcctctggatccttggctgtcacaactcagacttcagaaacaggggcatgactgccctgcttaaggtgtccagctgtgacaagaacactggggactactatgaggactcctatgaggacatcagtgcctaccttctgtccaagaacaatgccattgaacctaggagcttcagccagaactccaggcacccaagcaccaggcagaagcagttcaatgccaccaccatccctgagaacactaccctgcaatcagaccaagaagaaattgactatgatgacaccatctcagtggagatgaagaaggaggactttgacatctatgatgaagatgaaaaccaaagccccagatccttccagaaaaagaccaggcactacttcattgcagcagtggagagattatgggactatgggatgtccagctcccctcatgtgctgagaaacagagcacagtctggctcagtgccccagttcaagaaggtggtgttccaggagttcactgatggttccttcacccaaccattgtacaggggagagctgaatgagcacctgggcctgttgggcccatacatcagagcagaagtggaggacaacatcatggtcaccttcagaaaccaggcctccagaccctactccttctactcctccctgatctcctatgaagaggaccaaagacagggagctgagcccagaaagaactttgtgaagccaaatgaaaccaagacctacttctggaaagtgcagcaccacatggcccccaccaaggatgagtttgactgcaaagcttgggcctacttcagtgatgtggacttggagaaggatgtgcactcaggtcttattggccctctgcttgtgtgccataccaacactcttaaccctgcacatggcagacaagtcactgtgcaggagtttgccctcttcttcaccatctttgatgaaacaaagtcctggtacttcacagaaaacatggaaaggaactgcagagccccttgcaacatccagatggaggaccccaccttcaaggaaaactacaggtttcatgccatcaatgggtacatcatggacaccctgcctggactggtcatggcccaggaccagaggatcagatggtatctgctcagcatgggaagcaatgagaacatccactccattcacttcagtggtcatgtgttcactgtcaggaaaaaggaggagtacaagatggccctctacaacctttaccctggagtgtttgaaactgtggaaatgctgccatccaaggctggcatctggagggtggaatgcctcattggtgaacacctccatgctggaatgtccaccctcttcctggtgtacagcaacaagtgccagacccccctgggaatggcttcagggcacatcagagacttccagatcactgcctctgggcagtatggacagtgggcccctaagctggccaggctccactactctggaagcatcaatgcctggtccactaaggagcccttctcctggatcaaagtggatctgctggcccccatgatcatccatggcattaagacccagggggccagacagaagttctcctccctctacataagccagttcattatcatgtacagcctggatgggaagaagtggcagacctacaggggcaactccactggaaccctgatggtgttctttgggaatgtggacagctcaggcatcaagcacaacatcttcaaccccccaatcattgccagatacatcaggctccaccccacccactacagcatcagatccaccctgagaatggaacttatgggctgtgacctcaactcctgtagcatgcccctgggcatggagtccaaggccatttcagatgcccaaatcactgcatcctcctacttcaccaacatgtttgccacttggagcccttccaaggccagactgcatctgcaaggcagatccaatgcctggaggccccaggtcaacaaccctaaggaatggctccaggtggacttccaaaagactatgaaagtcactggagtgaccacccagggagtgaagtccctgctgacctctatgtatgtgaaggaattcctcatctcctcaagccaagatggacaccagtggaccctgttcttccaaaatggaaaggtcaaagtgttccagggcaaccaggacagcttcacccctgtggtgaactccttggacccccccctgttgaccagatacctgaggatccacccccagtcctgggtccaccagattgccttgagaatggaggtgctgggctgtgaagcccaggacctctactaattaattaacagacatgataagatacattgatgagtttggacaaaccacaactagaatgcagtgaaaaaaatgctttatttgtgaaatttgtgatgctattgctttatttgtaaccattataagctgcaataaacaagttaacaacaacaattgcattcattttatgtttcaggttcagggggagatgtgggaggttttttaaagcaagtaaaacctctacaaatgtggtatctagagcatggctacgtagataagtagcatggcgggttaatcattaactacacctgcaggaggaacccctagtgatggagttggccactccctctctgcgcgctcgctcgctcactgaggccgggcgaccaaaggtcgcccgacgcccgggcggcctcagtgagcgagcgagcgcgcagctgcctgcagg

SEQ ID NO: 480 - DNA, 6456 bp, Artificial Sequence
  Description of Artificial Sequence: Synthetic polynucleotide
cctgcaggcagctgcgcgctcgctcgctcactgaggccgcccgggcaaagcccgggcgtcgggcgacctttggtcgcccggcctcagtgagcgagcgagcgcgcagagagggagtggccaactccatcactaggggttccttgtagttaatgattaacccgccatgctacttatcgcggccgcaggctcagaggcacacaggagtttctgggctcaccctgcccccttccaacccctcagttcccatcctccagcagctgtttgtgtgctgcctctgaagtccacactgaacaaacttcagcctactcatgtccctaaaatgggcaaacattgcaagcagcaaacagcaaacacacagccctccctgcctgctgaccttggagctggggcagaggtcagagacctctctgggcccatgccacctccaacatccactcgaccccttggaatttcggtggagaggagcagaggttgtcctggcgtggtttaggtagtgtgagagggtccgggttcaaaaccacttgctgggtggggagtcgtcagtaagtggctatgccccgaccccgaagcctgtttccccatctgtacaatggaaatgataaagacgcccatctgatagggtttttgtggcaaataaacatttggtttttttgttttgttttgttttgttttttgagatggaggtttgctctgtcgcccaggctggagtgcagtgacacaatctcatctcaccacaaccttcccctgcctcagcctcccaagtagctgggattacaagcatgtgccaccacacctggctaattttctatttttagtagagacgggtttctccatgttggtcagcctcagcctcccaagtaactgggattacaggcctgtgccaccacacccggctaattttttctatttttgacagggacggggtttcaccatgttggtcaggctggtctagaggtactggatcttgctaccagtggaacagccactaaggattctgcagtgagagcagagggccagctaagtggtactctcccagagactgtctgactcacgccaccccctccaccttggacacaggacgctgtggtttctgagccaggtacaatgactcctttcggtaagtgcagtggaagctgtacactgcccaggcaaagcgtccgggcagcgtaggcgggcgactcagatcccagccagtggacttagcccctgtttgctcctccgataactggggtgaccttggttaatattcaccagcagcctcccccgttgcccctctggatccactgcttaaatacggacgaggacagggccctgtctcctcagcttcaggcaccaccactgacctgggacagtgaataattactctaaggtaaatataaaatttttaagtgtataatgtgttaaactactgattctaattgtttctctcttttagattccaacctttggaactgagtttaaacagccaccatgcagattgaactctccacctgtttcttcctgtgcctgctgagattctgcttcagtgccaccaggaggtactacttgggtgcagtggagctctcctgggactacatgcagtcagacctgggagagctccctgtggatgccaggttccctccaagggtccctaaatccttccccttcaacacctcagtggtgtacaagaaaaccctgtttgtggaattcactgaccacctgttcaacattgccaagcccaggccaccctggatggggctcctgggcccaaccatccaagctgaagtgtatgacactgtggtcatcaccctcaagaacatggcctcccaccctgtctccctgcatgctgtgggagtgtcctactggaaggcctcagagggggctgagtatgatgaccagacctcccagagggaaaaggaagatgacaaggtgttcccaggaggatcccacacctatgtgtggcaagtcctgaaggaaaatggtcccatggcatcagaccccttgtgcttgacctactcctacctgagccatgtggacctggtcaaggacctgaactcaggccttattggagccctgcttgtatgcagagagggcagcctggccaaggaaaagacccagaccctgcacaagttcatcctcctgtttgctgtgtttgatgaaggaaagtcctggcactcagagactaagaacagcctgatgcaggacagggatgcagcatcagccagagcctggcccaagatgcacactgtgaatggatatgtgaacaggtccctccctggactaattggatgccacagaaagtctgtgtactggcatgtcattggaatgggcacaacccctgaagtgcatagcatcttcctggaaggacacaccttcctggtcaggaaccacagacaggcatccctggagatctccccaatcaccttcctgactgcccagactctcctgatggacctgggacagttcttgcttttctgccacatctcctcccaccaacatgatggcatggaagcctatgtgaaggtggactcctgccctgaggaacctcaactgaggatgaaaaacaatgaagaagctgaagattatgatgatgacctgactgactcagagatggatgttgtcagatttgatgatgacaacagccctagcttcatccagattagatctgtggccaagaagcaccccaagacctgggtgcactacattgctgctgaggaagaggactgggactatgcccccctggtgctggcccctgatgacagatcctacaagtcccagtacctgaacaatggtccccagagaattgggagaaagtacaagaaagtcagattcatggcctacactgatgaaaccttcaagactagagaagccatccagcatgagtcaggcattctgggtcccctgctgtatggggaagttggtgacaccctgctgatcatcttcaagaaccaagccagcaggccttacaacatctacccccatggaattacagatgtcaggccactgtactccaggagactgcctaagggagtcaagcacctcaaggacttccccatcctgcctggagaaatcttcaagtacaagtggactgtgactgtggaggatgggcctaccaagtcagaccctagatgcctgactaggtactactccagctttgtcaacatggagagagacttggcctcaggactcattggtccactgcttatttgctacaaggagtcagtggaccagagaggaaaccaaatcatgtctgacaagagaaatgtcatcctgttctcagtctttgatgagaacaggtcctggtacctgactgaaaacatccagagattcctgcccaaccctgctggggtgcaactggaggaccctgagttccaggcctcaaacataatgcacagcatcaatggctatgtctttgactccctgcaactgtcagtgtgcttgcatgaagtggcctactggtacatcctctccattggggcccagactgacttcctgtcagtgtttttctctggctacaccttcaagcataaaatggtgtatgaggacaccctcaccctgttccccttctctggagagactgtgttcatgagcatggaaaacccaggcctctggatccttggctgtcacaactcagacttcagaaacaggggcatgactgccctgcttaaggtgtccagctgtgacaagaacactggggactactatgaggactcctatgaggacatcagtgcctaccttctgtccaagaacaatgccattgaacctaggagcttcagccagaactccaggcacccaagcaccaggcagaagcagttcaatgccaccaccatccctgagaacactaccctgcaatcagaccaagaagaaattgactatgatgacaccatctcagtggagatgaagaaggaggactttgacatctatgatgaagatgaaaaccaaagccccagatccttccagaaaaagaccaggcactacttcattgcagcagtggagagattatgggactatgggatgtccagctcccctcatgtgctgagaaacagagcacagtctggctcagtgccccagttcaagaaggtggtgttccaggagttcactgatggttccttcacccaaccattgtacaggggagagctgaatgagcacctgggcctgttgggcccatacatcagagcagaagtggaggacaacatcatggtcaccttcagaaaccaggcctccagaccctactccttctactcctccctgatctcctatgaagaggaccaaagacagggagctgagcccagaaagaactttgtgaagccaaatgaaaccaagacctacttctggaaagtgcagcaccacatggcccccaccaaggatgagtttgactgcaaagcttgggcctacttcagtgatgtggacttggagaaggatgtgcactcaggtcttattggccctctgcttgtgtgccataccaacactcttaaccctgcacatggcagacaagtcactgtgcaggagtttgccctcttcttcaccatctttgatgaaacaaagtcctggtacttcacagaaaacatggaaaggaactgcagagccccttgcaacatccagatggaggaccccaccttcaaggaaaactacaggtttcatgccatcaatgggtacatcatggacaccctgcctggactggtcatggcccaggaccagaggatcagatggtatctgctcagcatgggaagcaatgagaacatccactccattcacttcagtggtcatgtgttcactgtcaggaaaaaggaggagtacaagatggccctctacaacctttaccctggagtgtttgaaactgtggaaatgctgccatccaaggctggcatctggagggtggaatgcctcattggtgaacacctccatgctggaatgtccaccctcttcctggtgtacagcaacaagtgccagacccccctgggaatggcttcagggcacatcagagacttccagatcactgcctctgggcagtatggacagtgggcccctaagctggccaggctccactactctggaagcatcaatgcctggtccactaaggagcccttctcctggatcaaagtggatctgctggcccccatgatcatccatggcattaagacccagggggccagacagaagttctcctccctctacataagccagttcattatcatgtacagcctggatgggaagaagtggcagacctacaggggcaactccactggaaccctgatggtgttctttgggaatgtggacagctcaggcatcaagcacaacatcttcaaccccccaatcattgccagatacatcaggctccaccccacccactacagcatcagatccaccctgagaatggaacttatgggctgtgacctcaactcctgtagcatgcccctgggcatggagtccaaggccatttcagatgcccaaatcactgcatcctcctacttcaccaacatgtttgccacttggagcccttccaaggccagactgcatctgcaaggcagatccaatgcctggaggccccaggtcaacaaccctaaggaatggctccaggtggacttccaaaagactatgaaagtcactggagtgaccacccagggagtgaagtccctgctgacctctatgtatgtgaaggaattcctcatctcctcaagccaagatggacaccagtggaccctgttcttccaaaatggaaaggtcaaagtgttccagggcaaccaggacagcttcacccctgtggtgaactccttggacccccccctgttgaccagatacctgaggatccacccccagtcctgggtccaccagattgccttgagaatggaggtgctgggctgtgaagcccaggacctctactaattaattaagctcgctttcttgctgtccaatttctattaaaggttcctttgttccctaagtccaactactaaactgggggatattatgaagggccttgagcatctggattctgcctaataaaaaacatttattttcattgcaatgatgtatttaaattatttctgaatattttactaaaaagggaatgtgggaggtcagtgcatttaaaacataaagaaatgaagagctagttcaaaccttgggaaaatacactatatcttaaactccatgaaagaaggtgaggctgcaaacagctaatgcacattggcaacagcccctgatgcctatgccttattcatccctcagaaaaggattcaagtagaggcttgatttggaggttaaagttttgctatgctgtattttatctagagcatggctacgtagataagtagcatggcgggttaatcattaactacacctgcaggaggaacccctagtgatggagttggccactccctctctgcgcgctcgctcgctcactgaggccgggcgaccaaaggtcgcccgacgcccgggcggcctcagtgagcgagcgagcgcgcagctgcctgcagg

SEQ ID NO: 481 - DNA, 6250 bp, Artificial Sequence
  Description of Artificial Sequence: Synthetic polynucleotide
cctgcaggcagctgcgcgctcgctcgctcactgaggccgcccgggcaaagcccgggcgtcgggcgacctttggtcgcccggcctcagtgagcgagcgagcgcgcagagagggagtggccaactccatcactaggggttccttgtagttaatgattaacccgccatgctacttatcgcggccgcgggggaggctgctggtgaatattaaccaaggtcaccccagttatcggaggagcaaacaggggctaagtccaccgggggaggctgctggtgaatattaaccaaggtcaccccagttatcggaggagcaaacaggggctaagtccaccgggggaggctgctggtgaatattaaccaaggtcaccccagttatcggaggagcaaacaggggctaagtccacggtacccactgggaggatgttgagtaagatggaaaactactgatgacccttgcagagacagagtattaggacatgtttgaacaggggccgggcgatcagcaggtagctctagaggatccccgtctgtctgcacatttcgtagagcgagtgttccgatactctaatctccctaggcaaggttcatatttgtgtaggttacttattctccttttgttgactaagtcaataatcagaatcagcaggtttggagtcagcttggcagggatcagcagcctgggttggaaggagggggtataaaagccccttcaccaggagaagccgtcacacagatccacaagctcctgaagaggtaagggtttaagggatggttggttggtggggtattaatgtttaattacctggagcacctgcctgaaatcactttttttcaggttggtttaaacgccgccaccatgcagattgaactctccacctgtttcttcctgtgcctgctgagattctgcttcagtgccaccaggaggtactacttgggtgcagtggagctctcctgggactacatgcagtcagacctgggagagctccctgtggatgccaggttccctccaagggtccctaaatccttccccttcaacacctcagtggtgtacaagaaaaccctgtttgtggaattcactgaccacctgttcaacattgccaagcccaggccaccctggatggggctcctgggcccaaccatccaagctgaagtgtatgacactgtggtcatcaccctcaagaacatggcctcccaccctgtctccctgcatgctgtgggagtgtcctactggaaggcctcagagggggctgagtatgatgaccagacctcccagagggaaaaggaagatgacaaggtgttcccaggaggatcccacacctatgtgtggcaagtcctgaaggaaaatggtcccatggcatcagaccccttgtgcttgacctactcctacctgagccatgtggacctggtcaaggacctgaactcaggccttattggagccctgcttgtatgcagagagggcagcctggccaaggaaaagacccagaccctgcacaagttcatcctcctgtttgctgtgtttgatgaaggaaagtcctggcactcagagactaagaacagcctgatgcaggacagggatgcagcatcagccagagcctggcccaagatgcacactgtgaatggatatgtgaacaggtccctccctggactaattggatgccacagaaagtctgtgtactggcatgtcattggaatgggcacaacccctgaagtgcatagcatcttcctggaaggacacaccttcctggtcaggaaccacagacaggcatccctggagatctccccaatcaccttcctgactgcccagactctcctgatggacctgggacagttcttgcttttctgccacatctcctcccaccaacatgatggcatggaagcctatgtgaaggtggactcctgccctgaggaacctcaactgaggatgaaaaacaatgaagaagctgaagattatgatgatgacctgactgactcagagatggatgttgtcagatttgatgatgacaacagccctagcttcatccagattagatctgtggccaagaagcaccccaagacctgggtgcactacattgctgctgaggaagaggactgggactatgcccccctggtgctggcccctgatgacagatcctacaagtcccagtacctgaacaatggtccccagagaattgggagaaagtacaagaaagtcagattcatggcctacactgatgaaaccttcaagactagagaagccatccagcatgagtcaggcattctgggtcccctgctgtatggggaagttggtgacaccctgctgatcatcttcaagaaccaagccagcaggccttacaacatctacccccatggaattacagatgtcaggccactgtactccaggagactgcctaagggagtcaagcacctcaaggacttccccatcctgcctggagaaatcttcaagtacaagtggactgtgactgtggaggatgggcctaccaagtcagaccctagatgcctgactaggtactactccagctttgtcaacatggagagagacttggcctcaggactcattggtccactgcttatttgctacaaggagtcagtggaccagagaggaaaccaaatcatgtctgacaagagaaatgtcatcctgttctcagtctttgatgagaacaggtcctggtacctgactgaaaacatccagagattcctgcccaaccctgctggggtgcaactggaggaccctgagttccaggcctcaaacataatgcacagcatcaatggctatgtctttgactccctgcaactgtcagtgtgcttgcatgaagtggcctactggtacatcctctccattggggcccagactgacttcctgtcagtgtttttctctggctacaccttcaagcataaaatggtgtatgaggacaccctcaccctgttccccttctctggagagactgtgttcatgagcatggaaaacccaggcctctggatccttggctgtcacaactcagacttcagaaacaggggcatgactgccctgcttaaggtgtccagctgtgacaagaacactggggactactatgaggactcctatgaggacatcagtgcctaccttctgtccaagaacaatgccattgaacctaggagcttcagccagaactccaggcacccaagcaccaggcagaagcagttcaatgccaccaccatccctgagaacactaccctgcaatcagaccaagaagaaattgactatgatgacaccatctcagtggagatgaagaaggaggactttgacatctatgatgaagatgaaaaccaaagccccagatccttccagaaaaagaccaggcactacttcattgcagcagtggagagattatgggactatgggatgtccagctcccctcatgtgctgagaaacagagcacagtctggctcagtgccccagttcaagaaggtggtgttccaggagttcactgatggttccttcacccaaccattgtacaggggagagctgaatgagcacctgggcctgttgggcccatacatcagagcagaagtggaggacaacatcatggtcaccttcagaaaccaggcctccagaccctactccttctactcctccctgatctcctatgaagaggaccaaagacagggagctgagcccagaaagaactttgtgaagccaaatgaaaccaagacctacttctggaaagtgcagcaccacatggcccccaccaaggatgagtttgactgcaaagcttgggcctacttcagtgatgtggacttggagaaggatgtgcactcaggtcttattggccctctgcttgtgtgccataccaacactcttaaccctgcacatggcagacaagtcactgtgcaggagtttgccctcttcttcaccatctttgatgaaacaaagtcctggtacttcacagaaaacatggaaaggaactgcagagccccttgcaacatccagatggaggaccccaccttcaaggaaaactacaggtttcatgccatcaatgggtacatcatggacaccctgcctggactggtcatggcccaggaccagaggatcagatggtatctgctcagcatgggaagcaatgagaacatccactccattcacttcagtggtcatgtgttcactgtcaggaaaaaggaggagtacaagatggccctctacaacctttaccctggagtgtttgaaactgtggaaatgctgccatccaaggctggcatctggagggtggaatgcctcattggtgaacacctccatgctggaatgtccaccctcttcctggtgtacagcaacaagtgccagacccccctgggaatggcttcagggcacatcagagacttccagatcactgcctctgggcagtatggacagtgggcccctaagctggccaggctccactactctggaagcatcaatgcctggtccactaaggagcccttctcctggatcaaagtggatctgctggcccccatgatcatccatggcattaagacccagggggccagacagaagttctcctccctctacataagccagttcattatcatgtacagcctggatgggaagaagtggcagacctacaggggcaactccactggaaccctgatggtgttctttgggaatgtggacagctcaggcatcaagcacaacatcttcaaccccccaatcattgccagatacatcaggctccaccccacccactacagcatcagatccaccctgagaatggaacttatgggctgtgacctcaactcctgtagcatgcccctgggcatggagtccaaggccatttcagatgcccaaatcactgcatcctcctacttcaccaacatgtttgccacttggagcccttccaaggccagactgcatctgcaaggcagatccaatgcctggaggccccaggtcaacaaccctaaggaatggctccaggtggacttccaaaagactatgaaagtcactggagtgaccacccagggagtgaagtccctgctgacctctatgtatgtgaaggaattcctcatctcctcaagccaagatggacaccagtggaccctgttcttccaaaatggaaaggtcaaagtgttccagggcaaccaggacagcttcacccctgtggtgaactccttggacccccccctgttgaccagatacctgaggatccacccccagtcctgggtccaccagattgccttgagaatggaggtgctgggctgtgaagcccaggacctctactaattaattaagagcatcttaccgccatttattcccatatttgttctgtttttcttgatttgggtatacatttaaatgttaataaaacaaaatggtggggcaatcatttacatttttagggatatgtaattactagttcaggtgtattgccacaagacaaacatgttaagaaactttcccgttatttacgctctgttcctgttaatcaacctctggattacaaaatttgtgaaagattgactgatattcttaactatgttgctccttttacgctgtgtggatatgctgctttatagcctctgtatctagctattgcttcccgtacggctttcgttttctcctccttgtataaatcctggttgctgtctcttttagaggagttgtggcccgttgtccgtcaacgtggcgtggtgtgctctgtgtttgctgacgcaacccccactggctggggcattgccaccacctgtcaactcctttctgggactttcgctttccccctcccgatcgccacggcagaactcatcgccgcctgccttgcccgctgctggacaggggctaggttgctgggcactgataattccgtggtgttgtctgtgccttctagttgccagccatctgttgtttgcccctcccccgtgccttccttgaccctggaaggtgccactcccactgtcctttcctaataaaatgaggaaattgcatcgcattgtctgagtaggtgtcattctattctggggggtggggtggggcaggacagcaagggggaggattgggaagacaatagcaggcatgctggggatgcggtgggctctatggctctagagcatggctacgtagataagtagcatggcgggttaatcattaactacacctgcaggaggaacccctagtgatggagttggccactccctctctgcgcgctcgctcgctcactgaggccgggcgaccaaaggtcgcccgacgcccgggcggcctcagtgagcgagcgagcgcgcagctgcctgcagg

SEQ ID NO: 482 - DNA, 6251 bp, Artificial Sequence
  Description of Artificial Sequence: Synthetic polynucleotide
cctgcaggcagctgcgcgctcgctcgctcactgaggccgcccgggcaaagcccgggcgtcgggcgacctttggtcgcccggcctcagtgagcgagcgagcgcgcagagagggagtggccaactccatcactaggggttccttgtagttaatgattaacccgccatgctacttatcgcggccgcgggggaggctgctggtgaatattaaccaaggtcaccccagttatcggaggagcaaacaggggctaagtccaccgggggaggctgctggtgaatattaaccaaggtcaccccagttatcggaggagcaaacaggggctaagtccaccgggggaggctgctggtgaatattaaccaaggtcaccccagttatcggaggagcaaacaggggctaagtccacggtacccactgggaggatgttgagtaagatggaaaactactgatgacccttgcagagacagagtattaggacatgtttgaacaggggccgggcgatcagcaggtagctctagaggatccccgtctgtctgcacatttcgtagagcgagtgttccgatactctaatctccctaggcaaggttcatatttgtgtaggttacttattctccttttgttgactaagtcaataatcagaatcagcaggtttggagtcagcttggcagggatcagcagcctgggttggaaggagggggtataaaagccccttcaccaggagaagccgtcacacagatccacaagctcctgaagaggtaagggtttaagggatggttggttggtggggtattaatgtttaattacctggagcacctgcctgaaatcactttttttcaggttggtttaaaccgcagccaccatgcagattgaactctccacctgtttcttcctgtgcctgctgagattctgcttcagtgccaccaggaggtactacttgggtgcagtggagctctcctgggactacatgcagtcagacctgggagagctccctgtggatgccaggttccctccaagggtccctaaatccttccccttcaacacctcagtggtgtacaagaaaaccctgtttgtggaattcactgaccacctgttcaacattgccaagcccaggccaccctggatggggctcctgggcccaaccatccaagctgaagtgtatgacactgtggtcatcaccctcaagaacatggcctcccaccctgtctccctgcatgctgtgggagtgtcctactggaaggcctcagagggggctgagtatgatgaccagacctcccagagggaaaaggaagatgacaaggtgttcccaggaggatcccacacctatgtgtggcaagtcctgaaggaaaatggtcccatggcatcagaccccttgtgcttgacctactcctacctgagccatgtggacctggtcaaggacctgaactcaggccttattggagccctgcttgtatgcagagagggcagcctggccaaggaaaagacccagaccctgcacaagttcatcctcctgtttgctgtgtttgatgaaggaaagtcctggcactcagagactaagaacagcctgatgcaggacagggatgcagcatcagccagagcctggcccaagatgcacactgtgaatggatatgtgaacaggtccctccctggactaattggatgccacagaaagtctgtgtactggcatgtcattggaatgggcacaacccctgaagtgcatagcatcttcctggaaggacacaccttcctggtcaggaaccacagacaggcatccctggagatctccccaatcaccttcctgactgcccagactctcctgatggacctgggacagttcttgcttttctgccacatctcctcccaccaacatgatggcatggaagcctatgtgaaggtggactcctgccctgaggaacctcaactgaggatgaaaaacaatgaagaagctgaagattatgatgatgacctgactgactcagagatggatgttgtcagatttgatgatgacaacagccctagcttcatccagattagatctgtggccaagaagcaccccaagacctgggtgcactacattgctgctgaggaagaggactgggactatgcccccctggtgctggcccctgatgacagatcctacaagtcccagtacctgaacaatggtccccagagaattgggagaaagtacaagaaagtcagattcatggcctacactgatgaaaccttcaagactagagaagccatccagcatgagtcaggcattctgggtcccctgctgtatggggaagttggtgacaccctgctgatcatcttcaagaaccaagccagcaggccttacaacatctacccccatggaattacagatgtcaggccactgtactccaggagactgcctaagggagtcaagcacctcaaggacttccccatcctgcctggagaaatcttcaagtacaagtggactgtgactgtggaggatgggcctaccaagtcagaccctagatgcctgactaggtactactccagctttgtcaacatggagagagacttggcctcaggactcattggtccactgcttatttgctacaaggagtcagtggaccagagaggaaaccaaatcatgtctgacaagagaaatgtcatcctgttctcagtctttgatgagaacaggtcctggtacctgactgaaaacatccagagattcctgcccaaccctgctggggtgcaactggaggaccctgagttccaggcctcaaacataatgcacagcatcaatggctatgtctttgactccctgcaactgtcagtgtgcttgcatgaagtggcctactggtacatcctctccattggggcccagactgacttcctgtcagtgtttttctctggctacaccttcaagcataaaatggtgtatgaggacaccctcaccctgttccccttctctggagagactgtgttcatgagcatggaaaacccaggcctctggatccttggctgtcacaactcagacttcagaaacaggggcatgactgccctgcttaaggtgtccagctgtgacaagaacactggggactactatgaggactcctatgaggacatcagtgcctaccttctgtccaagaacaatgccattgaacctaggagcttcagccagaactccaggcacccaagcaccaggcagaagcagttcaatgccaccaccatccctgagaacactaccctgcaatcagaccaagaagaaattgactatgatgacaccatctcagtggagatgaagaaggaggactttgacatctatgatgaagatgaaaaccaaagccccagatccttccagaaaaagaccaggcactacttcattgcagcagtggagagattatgggactatgggatgtccagctcccctcatgtgctgagaaacagagcacagtctggctcagtgccccagttcaagaaggtggtgttccaggagttcactgatggttccttcacccaaccattgtacaggggagagctgaatgagcacctgggcctgttgggcccatacatcagagcagaagtggaggacaacatcatggtcaccttcagaaaccaggcctccagaccctactccttctactcctccctgatctcctatgaagaggaccaaagacagggagctgagcccagaaagaactttgtgaagccaaatgaaaccaagacctacttctggaaagtgcagcaccacatggcccccaccaaggatgagtttgactgcaaagcttgggcctacttcagtgatgtggacttggagaaggatgtgcactcaggtcttattggccctctgcttgtgtgccataccaacactcttaaccctgcacatggcagacaagtcactgtgcaggagtttgccctcttcttcaccatctttgatgaaacaaagtcctggtacttcacagaaaacatggaaaggaactgcagagccccttgcaacatccagatggaggaccccaccttcaaggaaaactacaggtttcatgccatcaatgggtacatcatggacaccctgcctggactggtcatggcccaggaccagaggatcagatggtatctgctcagcatgggaagcaatgagaacatccactccattcacttcagtggtcatgtgttcactgtcaggaaaaaggaggagtacaagatggccctctacaacctttaccctggagtgtttgaaactgtggaaatgctgccatccaaggctggcatctggagggtggaatgcctcattggtgaacacctccatgctggaatgtccaccctcttcctggtgtacagcaacaagtgccagacccccctgggaatggcttcagggcacatcagagacttccagatcactgcctctgggcagtatggacagtgggcccctaagctggccaggctccactactctggaagcatcaatgcctggtccactaaggagcccttctcctggatcaaagtggatctgctggcccccatgatcatccatggcattaagacccagggggccagacagaagttctcctccctctacataagccagttcattatcatgtacagcctggatgggaagaagtggcagacctacaggggcaactccactggaaccctgatggtgttctttgggaatgtggacagctcaggcatcaagcacaacatcttcaaccccccaatcattgccagatacatcaggctccaccccacccactacagcatcagatccaccctgagaatggaacttatgggctgtgacctcaactcctgtagcatgcccctgggcatggagtccaaggccatttcagatgcccaaatcactgcatcctcctacttcaccaacatgtttgccacttggagcccttccaaggccagactgcatctgcaaggcagatccaatgcctggaggccccaggtcaacaaccctaaggaatggctccaggtggacttccaaaagactatgaaagtcactggagtgaccacccagggagtgaagtccctgctgacctctatgtatgtgaaggaattcctcatctcctcaagccaagatggacaccagtggaccctgttcttccaaaatggaaaggtcaaagtgttccagggcaaccaggacagcttcacccctgtggtgaactccttggacccccccctgttgaccagatacctgaggatccacccccagtcctgggtccaccagattgccttgagaatggaggtgctgggctgtgaagcccaggacctctactaattaattaagagcatcttaccgccatttattcccatatttgttctgtttttcttgatttgggtatacatttaaatgttaataaaacaaaatggtggggcaatcatttacatttttagggatatgtaattactagttcaggtgtattgccacaagacaaacatgttaagaaactttcccgttatttacgctctgttcctgttaatcaacctctggattacaaaatttgtgaaagattgactgatattcttaactatgttgctccttttacgctgtgtggatatgctgctttatagcctctgtatctagctattgcttcccgtacggctttcgttttctcctccttgtataaatcctggttgctgtctcttttagaggagttgtggcccgttgtccgtcaacgtggcgtggtgtgctctgtgtttgctgacgcaacccccactggctggggcattgccaccacctgtcaactcctttctgggactttcgctttccccctcccgatcgccacggcagaactcatcgccgcctgccttgcccgctgctggacaggggctaggttgctgggcactgataattccgtggtgttgtctgtgccttctagttgccagccatctgttgtttgcccctcccccgtgccttccttgaccctggaaggtgccactcccactgtcctttcctaataaaatgaggaaattgcatcgcattgtctgagtaggtgtcattctattctggggggtggggtggggcaggacagcaagggggaggattgggaagacaatagcaggcatgctggggatgcggtgggctctatggctctagagcatggctacgtagataagtagcatggcgggttaatcattaactacacctgcaggaggaacccctagtgatggagttggccactccctctctgcgcgctcgctcgctcactgaggccgggcgaccaaaggtcgcccgacgcccgggcggcctcagtgagcgagcgagcgcgcagctgcctgcagg

SEQ ID NO: 483 - DNA, 6925 bp, Artificial Sequence
  Description of Artificial Sequence: Synthetic polynucleotide
cctgcaggcagctgcgcgctcgctcgctcactgaggccgcccgggcaaagcccgggcgtcgggcgacctttggtcgcccggcctcagtgagcgagcgagcgcgcagagagggagtggccaactccatcactaggggttccttgtagttaatgattaacccgccatgctacttatctacgtagccatgctctagacgggggaggctgctggtgaatattaaccaaggtcaccccagttatcggaggagcaaacaggggctaagtccacacgcgtggtaccgtctgtctgcacatttcgtagagcgagtgttccgatactctaatctccctaggcaaggttcatatttgtgtaggttacttattctccttttgttgactaagtcaataatcagaatcagcaggtttggagtcagcttggcagggatcagcagcctgggttggaaggagggggtataaaagccccttcaccaggagaagccgtcacacagatccacaagctcctgaagaggttggtttaaacgccgccaccatgcagattgagctgagcacctgcttcttcctgtgcctgctgaggttctgcttctctgccaccaggagatactacctgggggctgtggagctgagctgggactacatgcagtctgacctgggggagctgcctgtggatgccaggtaaaggcatgtcctgtagggtctgatcggggccaggattgtggggatgtaagtctgcttggaggaaggtgcagacatcgggttaggatggttgtgatgctacctgggccccaaagaaacatttctgggtaaggtgtgcacacatctgtgttattagcagaaatgctaactgccaattcttttcataggtctgacctatttgttgatattttgttctgttttgtccattgcttctcttcgtcatatgctgctcctccagaatctagagactggagtagagggagggtgaagggacaaagacaaaacttccctctgcctgcccaagcttccatagagagaatcaaggcaatgaaatccaatcaatatcacacacaagtttcatgtctggttctcttgtgtgtacatgcaatgtgtgtttttataatatcttttcctactttgggtgtaaggataatatgagccttgagttcagaagcttttcgtgttttgggggttctggttgagtaattgggagtatctgagtggagacaagaatgaacattaatgtaggactgattctgaattacagcttctggcactagtaggtttcaatatacatagtctgctgaaaggtaattttctctgtgatattcctggtatccctaaggagggaagtataattttaggtacatactgacaaaatttgaacacaaggtacttagatgaaagttatagtctgttttagagatgaaattgaaggatgcagtagctattgctttggcaaaggatttttggctgatgcagtgtatggttattgattttatgattcttatcatatggcacctaatgtatcagttgagttgtgaaaacagtgtttcggtttaatggatgttagggatttatatacaacttcaaatttgcctccttgctaatagtagaaaagagtagtatggaagcattacttccagctgctttttgaagtgtccaccaaaatgaacgactttttcctttcttcacgcaggttcccccccagagtgcccaagagcttccccttcaacacctctgtggtgtacaagaagaccctgtttgtggagttcactgaccacctgttcaacattgccaagcccaggcccccctggatgggcctgctgggccccaccatccaggctgaggtgtatgacactgtggtgatcaccctgaagaacatggccagccaccctgtgagcctgcatgctgtgggggtgagctactggaaggcctctgagggggctgagtatgatgaccagaccagccagagggagaaggaggatgacaaggtgttccctgggggcagccacacctatgtgtggcaggtgctgaaggagaatggccccatggcctctgaccccctgtgcctgacctacagctacctgagccatgtggacctggtgaaggacctgaactctggcctgattggggccctgctggtgtgcagggagggcagcctggccaaggagaagacccagaccctgcacaagttcatcctgctgtttgctgtgtttgatgagggcaagagctggcactctgaaaccaagaacagcctgatgcaggacagggatgctgcctctgccagggcctggcccaagatgcacactgtgaatggctatgtgaacaggagcctgcctggcctgattggctgccacaggaagtctgtgtactggcatgtgattggcatgggcaccacccctgaggtgcacagcatcttcctggagggccacaccttcctggtcaggaaccacaggcaggccagcctggagatcagccccatcaccttcctgactgcccagaccctgctgatggacctgggccagttcctgctgagctgccacatcagcagccaccagcatgatggcatggaggcctatgtgaaggtggacagctgccctgaggagccccagctgaggatgaagaacaatgaggaggctgaggactatgatgatgacctgactgactctgagatggatgtggtgaggtttgatgatgacaacagccccagcttcatccagatcaggtctgtggccaagaagcaccccaagacctgggtgcactacattgctgctgaggaggaggactgggactatgcccccctggtgctggcccctgatgacaggagctacaagagccagtacctgaacaatggcccccagaggattggcaggaagtacaagaaggtcaggttcatggcctacactgatgaaaccttcaagaccagggaggccatccagcatgagtctggcatcctgggccccctgctgtatggggaggtgggggacaccctgctgatcatcttcaagaaccaggccagcaggccctacaacatctacccccatggcatcactgatgtgaggcccctgtacagcaggaggctgcccaagggggtgaagcacctgaaggacttccccatcctgcctggggagatcttcaagtacaagtggactgtgactgtggaggatggccccaccaagtctgaccccaggtgcctgaccagatactacagcagctttgtgaacatggagagggacctggcctctggcctgattggccccctgctgatctgctacaaggagtctgtggaccagaggggcaaccagatcatgtctgacaagaggaatgtgatcctgttctctgtgtttgatgagaacaggagctggtacctgactgagaacatccagaggttcctgcccaaccctgctggggtgcagctggaggaccctgagttccaggccagcaacatcatgcacagcatcaatggctatgtgtttgacagcctgcagctgtctgtgtgcctgcatgaggtggcctactggtacatcctgagcattggggcccagactgacttcctgtctgtgttcttctctggctacaccttcaagcacaagatggtgtatgaggacaccctgaccctgttccccttctctggggagactgtgttcatgagcatggagaaccctggcctgtggattctgggctgccacaactctgacttcaggaacaggggcatgactgccctgctgaaagtctccagctgtgacaagaacactggggactactatgaggacagctatgaggacatctctgcctacctgctgagcaagaacaatgccattgagcccaggagcttcagccagaatagcaggcaccccagcaccaggcagaagcagttcaatgccaccaccatcccagagaataccaccctgcagtctgaccaggaggagattgactatgatgacaccatctctgtggagatgaagaaggaggactttgacatctacgacgaggacgagaaccagagccccaggagcttccagaagaagaccaggcactacttcattgctgctgtggagaggctgtgggactatggcatgagcagcagcccccatgtgctgaggaacagggcccagtctggctctgtgccccagttcaagaaggtggtgttccaggagttcactgatggcagcttcacccagcccctgtacagaggggagctgaatgagcacctgggcctgctgggcccctacatcagggctgaggtggaggacaacatcatggtgaccttcaggaaccaggccagcaggccctacagcttctacagcagcctgatcagctatgaggaggaccagaggcagggggctgagcccaggaagaactttgtgaagcccaatgaaaccaagacctacttctggaaggtgcagcaccacatggcccccaccaaggatgagtttgactgcaaggcctgggcctacttctctgatgtggacctggagaaggatgtgcactctggcctgattggccccctgctggtgtgccacaccaacaccctgaaccctgcccatggcaggcaggtgactgtgcaggagtttgccctgttcttcaccatctttgatgaaaccaagagctggtacttcactgagaacatggagaggaactgcagggccccctgcaacatccagatggaggaccccaccttcaaggagaactacaggttccatgccatcaatggctacatcatggacaccctgcctggcctggtgatggcccaggaccagaggatcaggtggtacctgctgagcatgggcagcaatgagaacatccacagcatccacttctctggccatgtgttcactgtgaggaagaaggaggagtacaagatggccctgtacaacctgtaccctggggtgtttgagactgtggagatgctgcccagcaaggctggcatctggagggtggagtgcctgattggggagcacctgcatgctggcatgagcaccctgttcctggtgtacagcaacaagtgccagacccccctgggcatggcctctggccacatcagggacttccagatcactgcctctggccagtatggccagtgggcccccaagctggccaggctgcactactctggcagcatcaatgcctggagcaccaaggagcccttcagctggatcaaggtggacctgctggcccccatgatcatccatggcatcaagacccagggggccaggcagaagttcagcagcctgtacatcagccagttcatcatcatgtacagcctggatggcaagaagtggcagacctacaggggcaacagcactggcaccctgatggtgttctttggcaatgtggacagctctggcatcaagcacaacatcttcaacccccccatcattgccagatacatcaggctgcaccccacccactacagcatcaggagcaccctgaggatggagctgatgggctgtgacctgaacagctgcagcatgcccctgggcatggagagcaaggccatctctgatgcccagatcactgccagcagctacttcaccaacatgtttgccacctggagccccagcaaggccaggctgcacctgcagggcaggagcaatgcctggaggccccaggtcaacaaccccaaggagtggctgcaggtggacttccagaagaccatgaaggtgactggggtgaccacccagggggtgaagagcctgctgaccagcatgtatgtgaaggagttcctgatcagcagcagccaggatggccaccagtggaccctgttcttccagaatggcaaggtgaaggtgttccagggcaaccaggacagcttcacccctgtggtgaacagcctggacccccccctgctgaccagatacctgaggattcacccccagagctgggtgcaccagattgccctgaggatggaggtgctgggctgtgaggcccaggacctgtactgattaattaagagcatcttaccgccatttattcccatatttgttctgtttttcttgatttgggtatacatttaaatgttaataaaacaaaatggtggggcaatcatttacatttttagggatatgtaattactagttcaggtgtattgccacaagacaaacatgttaagaaactttcccgttatttacgctctgttcctgttaatcaacctctggattacaaaatttgtgaaagattgactgatattcttaactatgttgctccttttacgctgtgtggatatgctgctttatagcctctgtatctagctattgcttcccgtacggctttcgttttctcctccttgtataaatcctggttgctgtctcttttagaggagttgtggcccgttgtccgtcaacgtggcgtggtgtgctctgtgtttgctgacgcaacccccactggctggggcattgccaccacctgtcaactcctttctgggactttcgctttccccctcccgatcgccacggcagaactcatcgccgcctgccttgcccgctgctggacaggggctaggttgctgggcactgataattccgtggtgttgtctgtgccttctagttgccagccatctgttgtttgcccctcccccgtgccttccttgaccctggaaggtgccactcccactgtcctttcctaataaaatgaggaaattgcatcgcattgtctgagtaggtgtcattctattctggggggtggggtggggcaggacagcaagggggaggattgggaagacaatagcaggcatgctggggatgcggtgggctctatggctctagagcatggctacgtagataagtagcatggcgggttaatcattaactacacctgcaggaggaacccctagtgatggagttggccactccctctctgcgcgctcgctcgctcactgaggccgggcgaccaaaggtcgcccgacgcccgggcggcctcagtgagcgagcgagcgcgcagctgcctgcagg

SEQ ID NO: 484 - DNA, 541 bp, Artificial Sequence
  Description of Artificial Sequence: Synthetic polynucleotide
gttaatcattaacgcttgtactttggtacagttaatcattaacgcttgtactttggtacagttaatcattaacgcttgtactttggtacaatcgatgcgagaacttgtgcctccccgtgttcctgctctttgtccctctgtcctacttagactaatatttgccttgggtactgcaaacaggaaatgggggagggacaggagtagggcggagggtagcccggggattctgcagtgagagcagagggccagctaagtggtactctcccagagactgtctgactcacgccaccccctccaccttggacacaggacgctgtggtttctgagccaggtacaatgactcctttcggtaagtgcagtggaagctgtacactgcccaggcaaagcgtccgggcagcgtaggcgggcgactcagatcccagccagtggacttagcccctgtttgctcctccgataactggggtgaccttggttaatattcaccagcagcctcccccgttgcccctctggatccactgcttaaatacggacgaggacaggc

SEQ ID NO: 485 - DNA, 321 bp, Artificial Sequence
  Description of Artificial Sequence: Synthetic polynucleotide
aggctcagaggcacacaggagtttctgggctcaccctgcccccttccaacccctcagttcccatcctccagcagctgtttgtgtgctgcctctgaagtccacactgaacaaacttcagcctactcatgtccctaaaatgggcaaacattgcaagcagcaaacagcaaacacacagccctccctgcctgctgaccttggagctggggcagaggtcagagacctctctgggcccatgccacctccaacatccactcgaccccttggaatttcggtggagaggagcagaggttgtcctggcgtggtttaggtagtgtgagaggg

SEQ ID NO: 486 - protein, 4 aa, Artificial Sequence
  Description of Artificial Sequence: Synthetic peptide
EITR

SEQ ID NO: 487 - DNA, 94 bp, Artificial Sequence
  Description of Artificial Sequence: Synthetic oligonucleotide
atggcatttctgtggctgctgtcctgctgggctctgctgggcactacctttggggccaccaggagatactacctgggggctgtggagctgagct

SEQ ID NO: 488 - protein, 31 aa, Artificial Sequence
  Description of Artificial Sequence: Synthetic polypeptide
MAFLWLLSCWALLGTTFGATRRYYLGAVELS

SEQ ID NO: 489 - DNA, 134 bp, Artificial Sequence
  Description of Artificial Sequence: Synthetic polynucleotide
atgcagattgagctgagcacctgcttcttcctgtgcctgctgaggttctgcttctctgccaccaggagatactacctgggggctgtggagctgagctgggactacatgcagtctgacctgggggagctgcctgt

SEQ ID NO: 490 - protein, 45 aa, Artificial Sequence
  Description of Artificial Sequence: Synthetic polypeptide
MQIELSTCFFLCLLRFCFSATRRYYLGAVELSWDYMQSDLGELPV

SEQ ID NO: 491 - protein, 10 aa, Artificial Sequence
  Description of Artificial Sequence: Synthetic peptide
NPPVLKRHQR

SEQ ID NO: 492 - protein, 2351 aa, Homo sapiens
MQIELSTCFFLCLLRFCFSATRRYYLGAVELSWDYMQSDLGELPVDARFPPRVPKSFPFNTSVVYKKTLFVEFTDHLFNIAKPRPPWMGLLGPTIQAEVYDTVVITLKNMASHPVSLHAVGVSYWKASEGAEYDDQTSQREKEDDKVFPGGSHTYVWQVLKENGPMASDPLCLTYSYLSHVDLVKDLNSGLIGALLVCREGSLAKEKTQTLHKFILLFAVFDEGKSWHSETKNSLMQDRDAASARAWPKMHTVNGYVNRSLPGLIGCHRKSVYWHVIGMGTTPEVHSIFLEGHTFLVRNHRQASLEISPITFLTAQTLLMDLGQFLLFCHISSHQHDGMEAYVKVDSCPEEPQLRMKNNEEAEDYDDDLTDSEMDVVRFDDDNSPSFIQIRSVAKKHPKTWVHYIAAEEEDWDYAPLVLAPDDRSYKSQYLNNGPQRIGRKYKKVRFMAYTDETFKTREAIQHESGILGPLLYGEVGDTLLIIFKNQASRPYNIYPHGITDVRPLYSRRLPKGVKHLKDFPILPGEIFKYKWTVTVEDGPTKSDPRCLTRYYSSFVNMERDLASGLIGPLLICYKESVDQRGNQIMSDKRNVILFSVFDENRSWYLTENIQRFLPNPAGVQLEDPEFQASNIMHSINGYVFDSLQLSVCLHEVAYWYILSIGAQTDFLSVFFSGYTFKHKMVYEDTLTLFPFSGETVFMSMENPGLWILGCHNSDFRNRGMTALLKVSSCDKNTGDYYEDSYEDISAYLLSKNNAIEPRSFSQNSRHPSTRQKQFNATTIPENDIEKTDPWFAHRTPMPKIQNVSSSDLLMLLRQSPTPHGLSLSDLQEAKYETFSDDPSPGAIDSNNSLSEMTHFRPQLHHSGDMVFTPESGLQLRLNEKLGTTAATELKKLDFKVSSTSNNLISTIPSDNLAAGTDNTSSLGPPSMPVHYDSQLDTTLFGKKSSPLTESGGPLSLSEENNDSKLLESGLMNSQESSWGKNVSSTESGRLFKGKRAHGPALLTKDNALFKVSISLLKTNKTSNNSATNRKTHIDGPSLLIENSPSVWQNILESDTEFKKVTPLIHDRMLMDKNATALRLNHMSNKTTSSKNMEMVQQKKEGPIPPDAQNPDMSFFKMLFLPESARWIQRTHGKNSLNSGQGPSPKQLVSLGPEKSVEGQNFLSEKNKVVVGKGEFTKDVGLKEMVFPSSRNLFLTNLDNLHENNTHNQEKKIQEEIEKKETLIQENVVLPQIHTVTGTKNFMKNLFLLSTRQNVEGSYDGAYAPVLQDFRSLNDSTNRTKKHTAHFSKKGEEENLEGLGNQTKQIVEKYACTTRISPNTSQQNFVTQRSKRALKQFRLPLEETELEKRIIVDDTSTQWSKNMKHLTPSTLTQIDYNEKEKGAITQSPLSDCLTRSHSIPQANRSPLPIAKVSSFPSIRPIYLTRVLFQDNSSHLPAASYRKKDSGVQESSHFLQGAKKNNLSLAILTLEMTGDQREVGSLGTSATNSVTYKKVENTVLPKPDLPKTSGKVELLPKVHIYQKDLFPTETSNGSPGHLDLVEGSLLQGTEGAIKWNEANRPGKVPFLRVATESSAKTPSKLLDPLAWDNHYGTQIPKEEWKSQEKSPEKTAFKKKDTILSLNACESNHAIAAINEGQNKPEIEVTWAKQGRTERLCSQNPPVLKRHQREITRTTLQSDQEEIDYDDTISVEMKKEDFDIYDEDENQSPRSFQKKTRHYFIAAVERLWDYGMSSSPHVLRNRAQSGSVPQFKKVVFQEFTDGSFTQPLYRGELNEHLGLLGPYIRAEVEDNIMVTFRNQASRPYSFYSSLISYEEDQRQGAEPRKNFVKPNETKTYFWKVQHHMAPTKDEFDCKAWAYFSDVDLEKDVHSGLIGPLLVCHTNTLNPAHGRQVTVQEFALFFTIFDETKSWYFTENMERNCRAPCNIQMEDPTFKENYRFHAINGYIMDTLPGLVMAQDQRIRWYLLSMGSNENIHSIHFSGHVFTVRKKEEYKMALYNLYPGVFETVEMLPSKAGIWRVECLIGEHLHAGMSTLFLVYSNKCQTPLGMASGHIRDFQITASGQYGQWAPKLARLHYSGSINAWSTKEPFSWIKVDLLAPMIIHGIKTQGARQKFSSLYISQFIIMYSLDGKKWQTYRGNSTGTLMVFFGNVDSSGIKHNIFNPPIIARYIRLHPTHYSIRSTLRMELMGCDLNSCSMPLGMESKAISDAQITASSYFTNMFATWSPSKARLHLQGRSNAWRPQVNNPKEWLQVDFQKTMKVTGVTTQGVKSLLTSMYVKEFLISSSQDGHQWTLFFQNGKVKVFQGNQDSFTPVVNSLDPPLLTRYLRIHPQSWVHQIALRMEVLGCEAQDLY

SEQ ID NO: 493 - DNA, 143 bp, Adeno-associated virus 1
ttgcccactccctctctgcgcgctcgctcgctcggtggggcctgcggaccaaaggtccgcagacggcagaggtctcctctgccggccccaccgagcgagcgacgcgcgcagagagggagtgggcaactccatcactagggtaa

SEQ ID NO: 494 - DNA, 143 bp, Adeno-associated virus 1
ttaccctagtgatggagttgcccactccctctctgcgcgcgtcgctcgctcggtggggccggcagaggagacctctgccgtctgcggacctttggtccgcaggccccaccgagcgagcgagcgcgcagagagggagtgggcaa

SEQ ID NO: 495 - DNA, 141 bp, Adeno-associated virus 2
cctgcaggcagctgcgcgctcgctcgctcactgaggccgcccgggcaaagcccgggcgtcgggcgacctttggtcgcccggcctcagtgagcgagcgagcgcgcagagagggagtggccaactccatcactaggggttcct

SEQ ID NO: 496 - DNA, 141 bp, Adeno-associated virus 2
aggaacccctagtgatggagttggccactccctctctgcgcgctcgctcgctcactgaggccgggcgaccaaaggtcgcccgacgcccgggctttgcccgggcggcctcagtgagcgagcgagcgcgcagctgcctgcagg

SEQ ID NO: 497 - DNA, 144 bp, Adeno-associated virus 3
ttggccactccctctatgcgcactcgctcgctcggtggggcctggcgaccaaaggtcgccagacggacgtgggtttccacgtccggccccaccgagcgagcgagtgcgcatagagggagtggccaactccatcactagaggtat

SEQ ID NO: 498 - DNA, 144 bp, Adeno-associated virus 3
atacctctagtgatggagttggccactccctctatgcgcactcgctcgctcggtggggccggacgtggaaacccacgtccgtctggcgacctttggtcgccaggccccaccgagcgagcgagtgcgcatagagggagtggccaa

SEQ ID NO: 499 - DNA, 127 bp, Adeno-associated virus 4
ttggccactccctctatgcgcgctcgctcactcactcggccctggagaccaaaggtctccagactgccggcctctggccggcagggccgagtgagtgagcgagcgcgcatagagggagtggccaact

SEQ ID NO: 500 - DNA, 127 bp, Adeno-associated virus 4
agttggccacattagctatgcgcgctcgctcactcactcggccctggagaccaaaggtctccagactgccggcctctggccggcagggccgagtgagtgagcgagcgcgcatagagggagtggccaa

SEQ ID NO: 501 - DNA, 166 bp, Adeno-associated virus 5
tcccccctgtcgcgttcgctcgctcgctggctcgtttgggggggcgacggccagagggccgtcgtctggcagctctttgagctgccacccccccaaacgagccagcgagcgagcgaacgcgacaggggggagagtgccacactctcaagcaagggggttttgtaag

SEQ ID NO: 502 - DNA, 166 bp, Adeno-associated virus 5
cttacaaaacccccttgcttgagagtgtggcactctcccccctgtcgcgttcgctcgctcgctggctcgtttgggggggtggcagctcaaagagctgccagacgacggccctctggccgtcgcccccccaaacgagccagcgagcgagcgaacgcgacagggggga

SEQ ID NO: 503 - DNA, 144 bp, Adeno-associated virus 6
ttgcccactccctctaatgcgcgctcgctcgctcggtggggcctgcggaccaaaggtccgcagacggcagaggtctcctctgccggccccaccgagcgagcgagcgcgcatagagggagtgggcaactccatcactaggggtat

SEQ ID NO: 504 - DNA, 144 bp, Adeno-associated virus 6
atacccctagtgatggagttgcccactccctctatgcgcgctcgctcgctcggtggggccggcagaggagacctctgccgtctgcggacctttggtccgcaggccccaccgagcgagcgagcgcgcattagagggagtgggcaa

SEQ ID NO: 505 - DNA, 120 bp, Artificial Sequence
  Description of Artificial Sequence: Synthetic polynucleotide
aggaacccctagtgatggagttggccactccctctctgcgcgctcgctcgctcactgaggcgcacgcccgggtttcccgggcggcctcagtgagcgagcgagcgcgcagctgcctgcagg

SEQ ID NO: 506 - DNA, 122 bp, Artificial Sequence
  Description of Artificial Sequence: Synthetic polynucleotide
aggaacccctagtgatggagttggccactccctctctgcgcgctcgctcgctcactgaggccgacgcccgggctttgcccgggcggcctcagtgagcgagcgagcgcgcagctgcctgcagg

SEQ ID NO: 507 - DNA, 129 bp, Artificial Sequence
  Description of Artificial Sequence: Synthetic polynucleotide
aggaacccctagtgatggagttggccactccctctctgcgcgctcgctcgctcactgaggccgggcgaccaaaggtcgcccgacgcccgggcgcctcagtgagcgagcgagcgcgcagctgcctgcagg

SEQ ID NO: 508 - DNA, 101 bp, Artificial Sequence
  Description of Artificial Sequence: Synthetic polynucleotide
aggaacccctagtgatggagttggccactccctctctgcgcgctcgctcgctcactgaggctttgcctcagtgagcgagcgagcgcgcagctgcctgcagg

SEQ ID NO: 509 - DNA, 139 bp, Artificial Sequence
  Description of Artificial Sequence: Synthetic polynucleotide
aggaacccctagtgatggagttggccactccctctctgcgcgctcgctcgctcactgaggccgggcgacaaagtcgcccgacgcccgggctttgcccgggcggcctcagtgagcgagcgagcgcgcagctgcctgcagg

SEQ ID NO: 510 - DNA, 137 bp, Artificial Sequence
  Description of Artificial Sequence: Synthetic polynucleotide
aggaacccctagtgatggagttggccactccctctctgcgcgctcgctcgctcactgaggccgggcgaaaatcgcccgacgcccgggctttgcccgggcggcctcagtgagcgagcgagcgcgcagctgcctgcagg

SEQ ID NO: 511 - DNA, 135 bp, Artificial Sequence
  Description of Artificial Sequence: Synthetic polynucleotide
aggaacccctagtgatggagttggccactccctctctgcgcgctcgctcgctcactgaggccgggcgaaacgcccgacgcccgggctttgcccgggcggcctcagtgagcgagcgagcgcgcagctgcctgcagg

SEQ ID NO: 512 - DNA, 133 bp, Artificial Sequence
  Description of Artificial Sequence: Synthetic polynucleotide
aggaacccctagtgatggagttggccactccctctctgcgcgctcgctcgctcactgaggccgggcaaagcccgacgcccgggctttgcccgggcggcctcagtgagcgagcgagcgcgcagctgcctgcagg

SEQ ID NO: 513 - DNA, 139 bp, Artificial Sequence
  Description of Artificial Sequence: Synthetic polynucleotide
aggaacccctagtgatggagttggccactccctctctgcgcgctcgctcgctcactgaggccgggcgaccaaaggtcgcccgacgcccgggtttcccgggcggcctcagtgagcgagcgagcgcgcagctgcctgcagg

SEQ ID NO: 514 - DNA, 137 bp, Artificial Sequence
  Description of Artificial Sequence: Synthetic polynucleotide
aggaacccctagtgatggagttggccactccctctctgcgcgctcgctcgctcactgaggccgggcgaccaaaggtcgcccgacgcccggtttccgggcggcctcagtgagcgagcgagcgcgcagctgcctgcagg

SEQ ID NO: 515 - DNA, 135 bp, Artificial Sequence
  Description of Artificial Sequence: Synthetic polynucleotide
aggaacccctagtgatggagttggccactccctctctgcgcgctcgctcgctcactgaggccgggcgaccaaaggtcgcccgacgcccgtttcgggcggcctcagtgagcgagcgagcgcgcagctgcctgcagg

SEQ ID NO: 516 - DNA, 133 bp, Artificial Sequence
  Description of Artificial Sequence: Synthetic polynucleotide
aggaacccctagtgatggagttggccactccctctctgcgcgctcgctcgctcactgaggccgggcgaccaaaggtcgcccgacgccctttgggcggcctcagtgagcgagcgagcgcgcagctgcctgcagg

SEQ ID NO: 517 - DNA, 131 bp, Artificial Sequence
  Description of Artificial Sequence: Synthetic polynucleotide
aggaacccctagtgatggagttggccactccctctctgcgcgctcgctcgctcactgaggccgggcgaccaaaggtcgcccgacgcctttggcggcctcagtgagcgagcgagcgcgcagctgcctgcagg

SEQ ID NO: 518 - DNA, 129 bp, Artificial Sequence
  Description of Artificial Sequence: Synthetic polynucleotide
aggaacccctagtgatggagttggccactccctctctgcgcgctcgctcgctcactgaggccgggcgaccaaaggtcgcccgacgctttgcggcctcagtgagcgagcgagcgcgcagctgcctgcagg

SEQ ID NO: 519 - DNA, 127 bp, Artificial Sequence
  Description of Artificial Sequence: Synthetic polynucleotide
aggaacccctagtgatggagttggccactccctctctgcgcgctcgctcgctcactgaggccgggcgaccaaaggtcgcccgacgtttcggcctcagtgagcgagcgagcgcgcagctgcctgcagg

SEQ ID NO: 520 - DNA, 122 bp, Artificial Sequence
  Description of Artificial Sequence: Synthetic polynucleotide
aggaacccctagtgatggagttggccactccctctctgcgcgctcgctcgctcactgaggccgggcgaccaaaggtcgcccgacggcctcagtgagcgagcgagcgcgcagctgcctgcagg

SEQ ID NO: 521 - DNA, 130 bp, Artificial Sequence
  Description of Artificial Sequence: Synthetic polynucleotide
aggaacccctagtgatggagttggccactccctctctgcgcgctcgctcgctcactgaggccgggcgaccaaaggtcgcccgacgcccgggcggcctcagtgagcgagcgagcgcgcagctgcctgcagg

SEQ ID NO: 522 - DNA, 120 bp, Artificial Sequence
  Description of Artificial Sequence: Synthetic polynucleotide
cctgcaggcagctgcgcgctcgctcgctcactgaggccgcccgggaaacccgggcgtgcgcctcagtgagcgagcgagcgcgcagagagggagtggccaactccatcactaggggttcct

SEQ ID NO: 523 - DNA, 122 bp, Artificial Sequence
  Description of Artificial Sequence: Synthetic polynucleotide
cctgcaggcagctgcgcgctcgctcgctcactgaggccgtcgggcgacctttggtcgcccggcctcagtgagcgagcgagcgcgcagagagggagtggccaactccatcactaggggttcct

SEQ ID NO: 524 - DNA, 122 bp, Artificial Sequence
  Description of Artificial Sequence: Synthetic polynucleotide
cctgcaggcagctgcgcgctcgctcgctcactgaggccgcccgggcaaagcccgggcgtcggcctcagtgagcgagcgagcgcgcagagagggagtggccaactccatcactaggggttcct

SEQ ID NO: 525 - DNA, 129 bp, Artificial Sequence
  Description of Artificial Sequence: Synthetic polynucleotide
cctgcaggcagctgcgcgctcgctcgctcactgaggcgcccgggcgtcgggcgacctttggtcgcccggcctcagtgagcgagcgagcgcgcagagagggagtggccaactccatcactaggggttcct

SEQ ID NO: 526 - DNA, 101 bp, Artificial Sequence
  Description of Artificial Sequence: Synthetic polynucleotide
cctgcaggcagctgcgcgctcgctcgctcactgaggcaaagcctcagtgagcgagcgagcgcgcagagagggagtggccaactccatcactaggggttcct

SEQ ID NO: 527 - DNA, 139 bp, Artificial Sequence
  Description of Artificial Sequence: Synthetic polynucleotide
cctgcaggcagctgcgcgctcgctcgctcactgaggccgcccgggcaaagcccgggcgtcgggcgactttgtcgcccggcctcagtgagcgagcgagcgcgcagagagggagtggccaactccatcactaggggttcct

SEQ ID NO: 528 - DNA, 137 bp, Artificial Sequence
  Description of Artificial Sequence: Synthetic polynucleotide
cctgcaggcagctgcgcgctcgctcgctcactgaggccgcccgggcaaagcccgggcgtcgggcgattttcgcccggcctcagtgagcgagcgagcgcgcagagagggagtggccaactccatcactaggggttcct

SEQ ID NO: 529 - DNA, 135 bp, Artificial Sequence
  Description of Artificial Sequence: Synthetic polynucleotide
cctgcaggcagctgcgcgctcgctcgctcactgaggccgcccgggcaaagcccgggcgtcgggcgtttcgcccggcctcagtgagcgagcgagcgcgcagagagggagtggccaactccatcactaggggttcct

SEQ ID NO: 530 - DNA, 133 bp, Artificial Sequence
  Description of Artificial Sequence: Synthetic polynucleotide
cctgcaggcagctgcgcgctcgctcgctcactgaggccgcccgggcaaagcccgggcgtcgggctttgcccggcctcagtgagcgagcgagcgcgcagagagggagtggccaactccatcactaggggttcct

SEQ ID NO: 531 - DNA, 139 bp, Artificial Sequence
  Description of Artificial Sequence: Synthetic polynucleotide
cctgcaggcagctgcgcgctcgctcgctcactgaggccgcccgggaaacccgggcgtcgggcgacctttggtcgcccggcctcagtgagcgagcgagcgcgcagagagggagtggccaactccatcactaggggttcct

SEQ ID NO: 532 - DNA, 137 bp, Artificial Sequence
  Description of Artificial Sequence: Synthetic polynucleotide
cctgcaggcagctgcgcgctcgctcgctcactgaggccgcccggaaaccgggcgtcgggcgacctttggtcgcccggcctcagtgagcgagcgagcgcgcagagagggagtggccaactccatcactaggggttcct

SEQ ID NO: 533 - DNA, 135 bp, Artificial Sequence
  Description of Artificial Sequence: Synthetic polynucleotide
cctgcaggcagctgcgcgctcgctcgctcactgaggccgcccgaaacgggcgtcgggcgacctttggtcgcccggcctcagtgagcgagcgagcgcgcagagagggagtggccaactccatcactaggggttcct

SEQ ID NO: 534 - DNA, 133 bp, Artificial Sequence
  Description of Artificial Sequence: Synthetic polynucleotide
cctgcaggcagctgcgcgctcgctcgctcactgaggccgcccaaagggcgtcgggcgacctttggtcgcccggcctcagtgagcgagcgagcgcgcagagagggagtggccaactccatcactaggggttcct

SEQ ID NO: 535 - DNA, 131 bp, Artificial Sequence
  Description of Artificial Sequence: Synthetic polynucleotide
cctgcaggcagctgcgcgctcgctcgctcactgaggccgccaaaggcgtcgggcgacctttggtcgcccggcctcagtgagcgagcgagcgcgcagagagggagtggccaactccatcactaggggttcct

SEQ ID NO: 536 - DNA, 129 bp, Artificial Sequence
  Description of Artificial Sequence: Synthetic polynucleotide
cctgcaggcagctgcgcgctcgctcgctcactgaggccgcaaagcgtcgggcgacctttggtcgcccggcctcagtgagcgagcgagcgcgcagagagggagtggccaactccatcactaggggttcct

SEQ ID NO: 537 - DNA, 127 bp, Artificial Sequence
  Description of Artificial Sequence: Synthetic polynucleotide
cctgcaggcagctgcgcgctcgctcgctcactgaggccgaaacgtcgggcgacctttggtcgcccggcctcagtgagcgagcgagcgcgcagagagggagtggccaactccatcactaggggttcct

SEQ ID NO: 538 - DNA, 12 bp, Artificial Sequence
  Description of Artificial Sequence: Synthetic oligonucleotide
atcgaacgatcg

SEQ ID NO: 539 - DNA, 12 bp, Artificial Sequence
  Description of Artificial Sequence: Synthetic oligonucleotide
cgatcgttcgat

SEQ ID NO: 540 - DNA, 12 bp, Artificial Sequence
  Description of Artificial Sequence: Synthetic oligonucleotide
atcgaaccatcg

SEQ ID NO: 541 - DNA, 225 bp, Artificial Sequence
  Description of Artificial Sequence: Synthetic polynucleotide
ccgtctgtctgcacatttcgtagagcgagtgttccgatactctaatctccctaggcaaggttcatatttgtgtaggttacttattctccttttgttgactaagtcaataatcagaatcagcaggtttggagtcagcttggcagggatcagcagcctgggttggaaggagggggtataaaagccccttcaccaggagaagccgtcacacagatccacaagctcctg

SEQ ID NO: 542 - DNA, 103 bp, Artificial Sequence
  Description of Artificial Sequence: Synthetic polynucleotide
taacaaacaccattgtcacactccatcaccaaacaccattgtcacactccacgatcaaacaccattgtcacactccatcaccaaacaccattgtcacactcca

SEQ ID NO: 543 - DNA, 77 bp, Artificial Sequence
  Description of Artificial Sequence: Synthetic oligonucleotide
tccataaagtaggaaacactacacgattccataaagtaggaaacactacatcactccataaagtaggaaacactaca

SEQ ID NO: 544 - DNA, 165 bp, Adeno-associated virus 2
aggaacccctagtgatggagttggccactccctctctgcgcgctcgctcgctcactgaggccgcccgggcaaagcccgggcgtcgggcgacctttggtcgcccggcctcagtgagcgagcgagcgcgcagagagggagtggccaactccatcactaggggttcct

SEQ ID NO: 545 - DNA, 140 bp, Adeno-associated virus 2
cccctagtgatggagttggccactccctctctgcgcgctcgctcgctcactgaggccgcccgggcaaagcccgggcgtcgggcgacctttggtcgcccggcctcagtgagcgagcgagcgcgcagagagatcactagggg

SEQ ID NO: 546 - DNA, 10 bp, Artificial Sequence
  Description of Artificial Sequence: Synthetic oligonucleotide
gggactttcc

SEQ ID NO: 547 - DNA, 91 bp, Adeno-associated virus 2
gcgcgctcgctcgctcactgaggccgcccgggcaaagcccgggcgtcgggcgacctttggtcgcccggcctcagtgagcgagcgagcgcgc

SEQ ID NO: 548 - DNA, 11 bp, Artificial Sequence
  Description of Artificial Sequence: Synthetic oligonucleotide
ggggactttcc

SEQ ID NO: 549 - DNA, 80 bp, Adeno-associated virus 2
gcgcgctcgctcgctcactgaggccgcccgggcgtcgggcgacctttggtcgcccggcctcagtgagcgagcgagcgcgc

SEQ ID NO: 550 - DNA, 91 bp, Adeno-associated virus 2
gcgcgctcgctcgctcactgaggccgggcgaccaaaggtcgcccgacgcccgggctttgcccgggcggcctcagtgagcgagcgagcgcgc

SEQ ID NO: 551 - DNA, 80 bp, Artificial Sequence
  Description of Artificial Sequence: Synthetic oligonucleotide
gcgcgctcgctcgctcactgaggccgggcgaccaaaggtcgcccgacgcccgggcggcctcagtgagcgagcgagcgcgc

SEQ ID NO: 552 - protein, 1463 aa, Artificial Sequence
  Description of Artificial Sequence: Synthetic polypeptide
MQIELSTCFFLCLLRFCFSATRRYYLGAVELSWDYMQSDLGELPVDARFPPRVPKSFPFNTSVVYKKTLFVEFTDHLFNIAKPRPPWMGLLGPTIQAEVYDTVVITLKNMASHPVSLHAVGVSYWKASEGAEYDDQTSQREKEDDKVFPGGSHTYVWQVLKENGPMASDPLCLTYSYLSHVDLVKDLNSGLIGALLVCREGSLAKEKTQTLHKFILLFAVFDEGKSWHSETKNSLMQDRDAASARAWPKMHTVNGYVNRSLPGLIGCHRKSVYWHVIGMGTTPEVHSIFLEGHTFLVRNHRQASLEISPITFLTAQTLLMDLGQFLLFCHISSHQHDGMEAYVKVDSCPEEPQLRMKNNEEAEDYDDDLTDSEMDVVRFDDDNSPSFIQIRSVAKKHPKTWVHYIAAEEEDWDYAPLVLAPDDRSYKSQYLNNGPQRIGRKYKKVRFMAYTDETFKTREAIQHESGILGPLLYGEVGDTLLIIFKNQASRPYNIYPHGITDVRPLYSRRLPKGVKHLKDFPILPGEIFKYKWTVTVEDGPTKSDPRCLTRYYSSFVNMERDLASGLIGPLLICYKESVDQRGNQIMSDKRNVILFSVFDENRSWYLTENIQRFLPNPAGVQLEDPEFQASNIMHSINGYVFDSLQLSVCLHEVAYWYILSIGAQTDFLSVFFSGYTFKHKMVYEDTLTLFPFSGETVFMSMENPGLWILGCHNSDFRNRGMTALLKVSSCDKNTGDYYEDSYEDISAYLLSKNNAIEPRSFSQNSRHPSTRQKQFNATTIPENTTLQSDQEEIDYDDTISVEMKKEDFDIYDEDENQSPRSFQKKTRHYFIAAVERLWDYGMSSSPHVLRNRAQSGSVPQFKKVVFQEFTDGSFTQPLYRGELNEHLGLLGPYIRAEVEDNIMVTFRNQASRPYSFYSSLISYEEDQRQGAEPRKNFVKPNETKTYFWKVQHHMAPTKDEFDCKAWAYFSDVDLEKDVHSGLIGPLLVCHTNTLNPAHGRQVTVQEFALFFTIFDETKSWYFTENMERNCRAPCNIQMEDPTFKENYRFHAINGYIMDTLPGLVMAQDQRIRWYLLSMGSNENIHSIHFSGHVFTVRKKEEYKMALYNLYPGVFETVEMLPSKAGIWRVECLIGEHLHAGMSTLFLVYSNKCQTPLGMASGHIRDFQITASGQYGQWAPKLARLHYSGSINAWSTKEPFSWIKVDLLAPMIIHGIKTQGARQKFSSLYISQFIIMYSLDGKKWQTYRGNSTGTLMVFFGNVDSSGIKHNIFNPPIIARYIRLHPTHYSIRSTLRMELMGCDLNSCSMPLGMESKAISDAQITASSYFTNMFATWSPSKARLHLQGRSNAWRPQVNNPKEWLQVDFQKTMKVTGVTTQGVKSLLTSMYVKEFLISSSQDGHQWTLFFQNGKVKVFQGNQDSFTPVVNSLDPPLLTRYLRIHPQSWVHQIALRMEVLGCEAQDLY

SEQ ID NO: 553 - DNA, 520 bp, Artificial Sequence
  Description of Artificial Sequence: Synthetic polynucleotide
atgcaaattgagttatccacctgtttcttcctctgtctcctgaggttctgcttctctgccaccaggagatactacctgggggctgtggagctgtcctgggactacatgcaaagtgatctgggtgagctgcctgtggatgcaaggtaaaggcatgtcctgtagggtctgatcggggccaggattgtggggatgtctccttgctaatagtagaaaagagtagtatggaagcattacttccagctgctttttgaagtgtccaccaaaatgaacgactttttcctttcttcacgcagatttcctcctagagtgccaaaatcttttccattcaacacctcagtggtgtacaaaaagaccctgtttgtggagttcacagaccacctgttcaacatagccaagcccaggcccccctggatgggcctgctgggccccaccatccaggcagaggtttatgacacagtggtcatcaccctgaagaacatggcctcccaccctgtgtccctccatgctgtgggggtgagct

SEQ ID NO: 554 - DNA, 666 bp, Artificial Sequence
  Description of Artificial Sequence: Synthetic polynucleotide
atgcagattgagctgagcacctgcttcttcctgtgcctgctgaggttctgcttctctgccaccaggagatactacctgggggctgtggagctgagctgggactacatgcagtctgacctgggggagctgcctgtggatgccaggtaaaggcatgtcctgtagggtctgatcggggccaggattgtggggatgtaagtctgcttggaggaaggtgcagacatcgggttaggatggttgtgatgctacctgggccccaaagaaacatttctgggtaaggtgtgcacacatctgtgttattagcagaaatgctaactgccaattcttttcataggtctgacctattgttaatcattaacgcttgtactttggtacagttaatcattaacgcttgtactttggtacagttaatcattaacgcttgtactttggtacatatgattcttatcatatggcacctaatgtatcagttgagttgtgaaaacagtgtttcggtttaatggatgttagggatttatatacaacttcaaatttgcctccttgctaatagtagaaaagagtagtatggaagcattacttccagctgctttttgaagtgtccaccaaaatgaacgactttttcctttcttcacgcaggttcccccccagagtgcccaagagcttcccctt

SEQ ID NO: 555 - protein, 1444 aa, Artificial Sequence
  Description of Artificial Sequence: Synthetic polypeptide
ATRRYYLGAVELSWDYMQSDLGELPVDARFPPRVPKSFPFNTSVVYKKTLFVEFTDHLFNIAKPRPPWMGLLGPTIQAEVYDTVVITLKNMASHPVSLHAVGVSYWKASEGAEYDDQTSQREKEDDKVFPGGSHTYVWQVLKENGPMASDPLCLTYSYLSHVDLVKDLNSGLIGALLVCREGSLAKEKTQTLHKFILLFAVFDEGKSWHSETKNSLMQDRDAASARAWPKMHTVNGYVNRSLPGLIGCHRKSVYWHVIGMGTTPEVHSIFLEGHTFLVRNHRQASLEISPITFLTAQTLLMDLGQFLLFCHISSHQHDGMEAYVKVDSCPEEPQLRMKNNEEAEDYDDDLTDSEMDVVRFDDDNSPSFIQIRSVAKKHPKTWVHYIAAEEEDWDYAPLVLAPDDRSYKSQYLNNGPQRIGRKYKKVRFMAYTDETFKTREAIQHESGILGPLLYGEVGDTLLIIFKNQASRPYNIYPHGITDVRPLYSRRLPKGVKHLKDFPILPGEIFKYKWTVTVEDGPTKSDPRCLTRYYSSFVNMERDLASGLIGPLLICYKESVDQRGNQIMSDKRNVILFSVFDENRSWYLTENIQRFLPNPAGVQLEDPEFQASNIMHSINGYVFDSLQLSVCLHEVAYWYILSIGAQTDFLSVFFSGYTFKHKMVYEDTLTLFPFSGETVFMSMENPGLWILGCHNSDFRNRGMTALLKVSSCDKNTGDYYEDSYEDISAYLLSKNNAIEPRSFSQNSRHPSTRQKQFNATTIPENTTLQSDQEEIDYDDTISVEMKKEDFDIYDEDENQSPRSFQKKTRHYFIAAVERLWDYGMSSSPHVLRNRAQSGSVPQFKKVVFQEFTDGSFTQPLYRGELNEHLGLLGPYIRAEVEDNIMVTFRNQASRPYSFYSSLISYEEDQRQGAEPRKNFVKPNETKTYFWKVQHHMAPTKDEFDCKAWAYFSDVDLEKDVHSGLIGPLLVCHTNTLNPAHGRQVTVQEFALFFTIFDETKSWYFTENMERNCRAPCNIQMEDPTFKENYRFHAINGYIMDTLPGLVMAQDQRIRWYLLSMGSNENIHSIHFSGHVFTVRKKEEYKMALYNLYPGVFETVEMLPSKAGIWRVECLIGEHLHAGMSTLFLVYSNKCQTPLGMASGHIRDFQITASGQYGQWAPKLARLHYSGSINAWSTKEPFSWIKVDLLAPMIIHGIKTQGARQKFSSLYISQFIIMYSLDGKKWQTYRGNSTGTLMVFFGNVDSSGIKHNIFNPPIIARYIRLHPTHYSIRSTLRMELMGCDLNSCSMPLGMESKAISDAQITASSYFTNMFATWSPSKARLHLQGRSNAWRPQVNNPKEWLQVDFQKTMKVTGVTTQGVKSLLTSMYVKEFLISSSQDGHQWTLFFQNGKVKVFQGNQDSFTPVVNSLDPPLLTRYLRIHPQSWVHQIALRMEVLGCEAQDLY

SEQ ID NO: 556 - DNA, 4392 bp, Artificial Sequence; identical to SEQ ID NO: 76
  Description of Artificial Sequence: Synthetic polynucleotide

SEQ ID NO: 557 - DNA, 70 bp, Artificial Sequence
  Description of Artificial Sequence: Synthetic oligonucleotide
gggggaagctactggtgaatattaaccaaggtcacccagttatcagggagcaaacaggagctaagtccat

SEQ ID NO: 558 - DNA, 218 bp, Artificial Sequence
  Description of Artificial Sequence: Synthetic polynucleotide
gggggaggctgctggtaaacattaaccaaggtcaccccagttatcagaggagcaaacaggggcaaagtccaccgggggaggctgctggtaaacattaaccaaggtcaccccagttatcagaggagcaaacaggggcaaagtccaccgggggaggctgctggtaaacattaaccaaggtcaccccagttatcagaggagcaaacaggggcaaagtccac

SEQ ID NO: 559 - DNA, 218 bp, Artificial Sequence
  Description of Artificial Sequence: Synthetic polynucleotide
aggggaggctgctggtaaacattaaccaaggtcaccccagttatcagaggagcaaacaggggcaaagtccacagggggaggctgctggtaaacattaaccaaggtcaccccagttatcagaggagcaaacaggggcaaagtccacagggggaggctgctggtaaacattaaccaaggtcaccccagttatcagaggagcaaacaggggcaaagtccat

SEQ ID NO: 560 - DNA, 215 bp, Artificial Sequence
  Description of Artificial Sequence: Synthetic polynucleotide
gagggaggctgctggtaaacattaaccaaggtcacccagttatcagaggagcaaacaggggcaaagtccaccgagggaggctgctggtaaacattaaccaaggtcacccagttatcagaggagcaaacaggggcaaagtccaccgagggaggctgctggtaaacattaaccaaggtcacccagttatcagaggagcaaacaggggcaaagtccac

SEQ ID NO: 561 - DNA, 214 bp, Artificial Sequence
  Description of Artificial Sequence: Synthetic polynucleotide
agggaggctgctggtaaacattaaccaaggtcacccagttatcagaggagcaaacaggggcaaagtccacagagggaggctgctggtaaacattaaccaaggtcacccagttatcagaggagcaaacaggggcaaagtccacagagggaggctgctggtaaacattaaccaaggtcacccagttatcagaggagcaaacaggggcaaagtccat

SEQ ID NO: 562 - DNA, 218 bp, Artificial Sequence
  Description of Artificial Sequence: Synthetic polynucleotide
gggggaggctgctggtaaacattaaccaaggtcacctcagttatcagaggagcaaacagggacaaagtccaccgggggaggctgctggtaaacattaaccaaggtcacctcagttatcagaggagcaaacagggacaaagtccaccgggggaggctgctggtaaacattaaccaaggtcacctcagttatcagaggagcaaacagggacaaagtccac

SEQ ID NO: 563 - DNA, 219 bp, Artificial Sequence
  Description of Artificial Sequence: Synthetic polynucleotide
aggggaggctgctggtaaacattaaccaaggtcacctcagttatcagaggagcaaacagggacaaagtccacagggggaggctgctggtaaacattaaccaaggtcacctcagttatcagaggagcaaacagggacaaagtccacagggggaggctgctggtaaacattaaccaaggtcacctcagttatcagaggagcaaacagggacaaagtccaca

SEQ ID NO: 564 - DNA, 212 bp, Artificial Sequence
  Description of Artificial Sequence: Synthetic polynucleotide
gggaggctgctggtaaacattaaccaaggtcaccccagttatcagaggagcaaacaagggcaaagtccaccgggaggctgctggtaaacattaaccaaggtcaccccagttatcagaggagcaaacaagggcaaagtccaccgggaggctgctggtaaacattaaccaaggtcaccccagttatcagaggagcaaacaagggcaaagtccac

SEQ ID NO: 565 - DNA, 214 bp, Artificial Sequence
  Description of Artificial Sequence: Synthetic polynucleotide
agggaggctgctggtaaacattaaccaaggtcaccccagttatcagaggagcaaacaagggcaaagtccacagggaggctgctggtaaacattaaccaaggtcaccccagttatcagaggagcaaacaagggcaaagtccacagggaggctgctggtaaacattaaccaaggtcaccccagttatcagaggagcaaacaagggcaaagtccaca

SEQ ID NO: 566 - DNA, 220 bp, Artificial Sequence
  Description of Artificial Sequence: Synthetic polynucleotide
aggaggaggctgctggtaaacattaaccaaggtcacctcagttatcagaggagcaaacaggggcaaagtccacaggaggaggctgctggtaaacattaaccaaggtcacctcagttatcagaggagcaaacaggggcaaagtccacaggaggaggctgctggtaaacattaaccaaggtcacctcagttatcagaggagcaaacaggggcaaagtccaca

SEQ ID NO: 567 - DNA, 220 bp, Artificial Sequence
  Description of Artificial Sequence: Synthetic polynucleotide
agggggaggctgctggtaaacattaaccaaggtcacctcagttatcagaggagcaaacaggtgcaaagtccacagggggaggctgctggtaaacattaaccaaggtcacctcagttatcagaggagcaaacaggtgcaaagtccacagggggaggctgctggtaaacattaaccaaggtcacctcagttatcagaggagcaaacaggtgcaaagtccaca

SEQ ID NO: 568 - DNA, 220 bp, Artificial Sequence
  Description of Artificial Sequence: Synthetic polynucleotide
aggaggaggctgctggtaaacattaaccaaggtcaccccagttatcagaggagcaaacaggtgcaaagtccacaggaggaggctgctggtaaacattaaccaaggtcaccccagttatcagaggagcaaacaggtgcaaagtccacaggaggaggctgctggtaaacattaaccaaggtcaccccagttatcagaggagcaaacaggtgcaaagtccaca

SEQ ID NO: 569 - DNA, 209 bp, Artificial Sequence
  Description of Artificial Sequence: Synthetic polynucleotide
ggaggctgttggtgaatattaaccaaggtcacctcagttatcggaggagcaaacaagggctaagtccaccggaggctgttggtgaatattaaccaaggtcacctcagttatcggaggagcaaacaagggctaagtccaccggaggctgttggtgaatattaaccaaggtcacctcagttatcggaggagcaaacaagggctaagtccac

SEQ ID NO: 570 - DNA, 211 bp, Artificial Sequence
  Description of Artificial Sequence: Synthetic polynucleotide
aggaggctgttggtgaatattaaccaaggtcacctcagttatcagaggagcaaacaagggctaagtccacaggaggctgttggtgaatattaaccaaggtcacctcagttatcagaggagcaaacaagggctaagtccacaggaggctgttggtgaatattaaccaaggtcacctcagttatcagaggagcaaacaagggctaagtccaca

SEQ ID NO: 571 - DNA, 218 bp, Artificial Sequence
  Description of Artificial Sequence: Synthetic polynucleotide
gggggaggctgctggtgaatattaaccaaggtcaccccagttatcggaggagcaaacaggggctaagtccacagggggaggctgctggtgaatattaaccaaggtcaccccagttatcggaggagcaaacaggggctaagtccacagggggaggctgctggtgaatattaaccaaggtcaccccagttatcggaggagcaaacaggggctaagtccac

SEQ ID NO: 572 - DNA, 212 bp, Artificial Sequence
  Description of Artificial Sequence: Synthetic polynucleotide
aggggaagctactggtgaatattaaccaaggtcacccagttatcagggagcaaacaggagctaagtccatagggggaagctactggtgaatattaaccaaggtcacccagttatcagggagcaaacaggagctaagtccatagggggaagctactggtgaatattaaccaaggtcacccagttatcagggagcaaacaggagctaagtccat

SEQ ID NO: 573 - DNA, 364 bp, Artificial Sequence
  Description of Artificial Sequence: Synthetic polynucleotide
gggggaggctgctggtaaacattaaccaaggtcaccccagttatcagaggagcaaacaggggcaaagtccaccgggggaggctgctggtaaacattaaccaaggtcaccccagttatcagaggagcaaacaggggcaaagtccaccgggggaggctgctggtaaacattaaccaaggtcaccccagttatcagaggagcaaacaggggcaaagtccaccgggggaggctgctggtaaacattaaccaaggtcaccccagttatcagaggagcaaacaggggcaaagtccaccgggggaggctgctggtaaacattaaccaaggtcaccccagttatcagaggagcaaacaggggcaaagtccac

SEQ ID NO: 574 - DNA, 359 bp, Artificial Sequence
  Description of Artificial Sequence: Synthetic polynucleotide
gagggaggctgctggtaaacattaaccaaggtcacccagttatcagaggagcaaacaggggcaaagtccaccgagggaggctgctggtaaacattaaccaaggtcacccagttatcagaggagcaaacaggggcaaagtccaccgagggaggctgctggtaaacattaaccaaggtcacccagttatcagaggagcaaacaggggcaaagtccaccgagggaggctgctggtaaacattaaccaaggtcacccagttatcagaggagcaaacaggggcaaagtccaccgagggaggctgctggtaaacattaaccaaggtcacccagttatcagaggagcaaacaggggcaaagtccac

SEQ ID NO: 575 - DNA, 358 bp, Artificial Sequence
  Description of Artificial Sequence: Synthetic polynucleotide
agggaggctgctggtaaacattaaccaaggtcacccagttatcagaggagcaaacaggggcaaagtccacagagggaggctgctggtaaacattaaccaaggtcacccagttatcagaggagcaaacaggggcaaagtccacagagggaggctgctggtaaacattaaccaaggtcacccagttatcagaggagcaaacaggggcaaagtccacagagggaggctgctggtaaacattaaccaaggtcacccagttatcagaggagcaaacaggggcaaagtccacagagggaggctgctggtaaacattaaccaaggtcacccagttatcagaggagcaaacaggggcaaagtccat

SEQ ID NO: 576 - DNA, 364 bp, Artificial Sequence
  Description of Artificial Sequence: Synthetic polynucleotide
gggggaggctgctggtaaacattaaccaaggtcacctcagttatcagaggagcaaacagggacaaagtccaccgggggaggctgctggtaaacattaaccaaggtcacctcagttatcagaggagcaaacagggacaaagtccaccgggggaggctgctggtaaacattaaccaaggtcacctcagttatcagaggagcaaacagggacaaagtccaccgggggaggctgctggtaaacattaaccaaggtcacctcagttatcagaggagcaaacagggacaaagtccaccgggggaggctgctggtaaacattaaccaaggtcacctcagttatcagaggagcaaacagggacaaagtccac

SEQ ID NO: 577 - DNA, 365 bp, Artificial Sequence
  Description of Artificial Sequence: Synthetic polynucleotide
aggggaggctgctggtaaacattaaccaaggtcacctcagttatcagaggagcaaacagggacaaagtccacagggggaggctgctggtaaacattaaccaaggtcacctcagttatcagaggagcaaacagggacaaagtccacagggggaggctgctggtaaacattaaccaaggtcacctcagttatcagaggagcaaacagggacaaagtccacagggggaggctgctggtaaacattaaccaaggtcacctcagttatcagaggagcaaacagggacaaagtccacagggggaggctgctggtaaacattaaccaaggtcacctcagttatcagaggagcaaacagggacaaagtccaca

SEQ ID NO: 578 - DNA, 354 bp, Artificial Sequence
  Description of Artificial Sequence: Synthetic polynucleotide
gggaggctgctggtaaacattaaccaaggtcaccccagttatcagaggagcaaacaagggcaaagtccaccgggaggctgctggtaaacattaaccaaggtcaccccagttatcagaggagcaaacaagggcaaagtccaccgggaggctgctggtaaacattaaccaaggtcaccccagttatcagaggagcaaacaagggcaaagtccaccgggaggctgctggtaaacattaaccaaggtcaccccagttatcagaggagcaaacaagggcaaagtccaccgggaggctgctggtaaacattaaccaaggtcaccccagttatcagaggagcaaacaagggcaaagtccac

SEQ ID NO: 579 - DNA, 356 bp, Artificial Sequence
  Description of Artificial Sequence: Synthetic polynucleotide
agggaggctgctggtaaacattaaccaaggtcaccccagttatcagaggagcaaacaagggcaaagtccacagggaggctgctggtaaacattaaccaaggtcaccccagttatcagaggagcaaacaagggcaaagtccacagggaggctgctggtaaacattaaccaaggtcaccccagttatcagaggagcaaacaagggcaaagtccacagggaggctgctggtaaacattaaccaaggtcaccccagttatcagaggagcaaacaagggcaaagtccacagggaggctgctggtaaacattaaccaaggtcaccccagttatcagaggagcaaacaagggcaaagtccaca

SEQ ID NO: 580 - DNA, 366 bp, Artificial Sequence
  Description of Artificial Sequence: Synthetic polynucleotide
aggaggaggctgctggtaaacattaaccaaggtcacctcagttatcagaggagcaaacaggggcaaagtccacaggaggaggctgctggtaaacattaaccaaggtcacctcagttatcagaggagcaaacaggggcaaagtccacaggaggaggctgctggtaaacattaaccaaggtcacctcagttatcagaggagcaaacaggggcaaagtccacaggaggaggctgctggtaaacattaaccaaggtcacctcagttatcagaggagcaaacaggggcaaagtccacaggaggaggctgctggtaaacattaaccaaggtcacctcagttatcagaggagcaaacaggggcaaagtccaca

SEQ ID NO: 581 - DNA, 366 bp, Artificial Sequence
  Description of Artificial Sequence: Synthetic polynucleotide
agggggaggctgctggtaaacattaaccaaggtcacctcagttatcagaggagcaaacaggtgcaaagtccacagggggaggctgctggtaaacattaaccaaggtcacctcagttatcagaggagcaaacaggtgcaaagtccacagggggaggctgctggtaaacattaaccaaggtcacctcagttatcagaggagcaaacaggtgcaaagtccacagggggaggctgctggtaaacattaaccaaggtcacctcagttatcagaggagcaaacaggtgcaaagtccacagggggaggctgctggtaaacattaaccaaggtcacctcagttatcagaggagcaaacaggtgcaaagtccaca

SEQ ID NO: 582 - DNA, 366 bp, Artificial Sequence
  Description of Artificial Sequence: Synthetic polynucleotide
aggaggaggctgctggtaaacattaaccaaggtcaccccagttatcagaggagcaaacaggtgcaaagtccacaggaggaggctgctggtaaacattaaccaaggtcaccccagttatcagaggagcaaacaggtgcaaagtccacaggaggaggctgctggtaaacattaaccaaggtcaccccagttatcagaggagcaaacaggtgcaaagtccacaggaggaggctgctggtaaacattaaccaaggtcaccccagttatcagaggagcaaacaggtgcaaagtccacaggaggaggctgctggtaaacattaaccaaggtcaccccagttatcagaggagcaaacaggtgcaaagtccaca

SEQ ID NO: 583 - DNA, 349 bp, Artificial Sequence
  Description of Artificial Sequence: Synthetic polynucleotide
ggaggctgttggtgaatattaaccaaggtcacctcagttatcggaggagcaaacaagggctaagtccaccggaggctgttggtgaatattaaccaaggtcacctcagttatcggaggagcaaacaagggctaagtccaccggaggctgttggtgaatattaaccaaggtcacctcagttatcggaggagcaaacaagggctaagtccaccggaggctgttggtgaatattaaccaaggtcacctcagttatcggaggagcaaacaagggctaagtccaccggaggctgttggtgaatattaaccaaggtcacctcagttatcggaggagcaaacaagggctaagtccac

SEQ ID NO: 584 - DNA, 351 bp, Artificial Sequence
  Description of Artificial Sequence: Synthetic polynucleotide
aggaggctgttggtgaatattaaccaaggtcacctcagttatcagaggagcaaacaagggctaagtccacaggaggctgttggtgaatattaaccaaggtcacctcagttatcagaggagcaaacaagggctaagtccacaggaggctgttggtgaatattaaccaaggtcacctcagttatcagaggagcaaacaagggctaagtccacaggaggctgttggtgaatattaaccaaggtcacctcagttatcagaggagcaaacaagggctaagtccacaggaggctgttggtgaatattaaccaaggtcacctcagttatcagaggagcaaacaagggctaagtccaca

SEQ ID NO: 585 - DNA, 354 bp, Artificial Sequence
  Description of Artificial Sequence: Synthetic polynucleotide
aggggaagctactggtgaatattaaccaaggtcacccagttatcagggagcaaacaggagctaagtccatagggggaagctactggtgaatattaaccaaggtcacccagttatcagggagcaaacaggagctaagtccatagggggaagctactggtgaatattaaccaaggtcacccagttatcagggagcaaacaggagctaagtccatagggggaagctactggtgaatattaaccaaggtcacccagttatcagggagcaaacaggagctaagtccatagggggaagctactggtgaatattaaccaaggtcacccagttatcagggagcaaacaggagctaagtccat

SEQ ID NO: 586 - DNA, 729 bp, Artificial Sequence
  Description of Artificial Sequence: Synthetic polynucleotide
gggggaggctgctggtaaacattaaccaaggtcaccccagttatcagaggagcaaacaggggcaaagtccaccgggggaggctgctggtaaacattaaccaaggtcaccccagttatcagaggagcaaacaggggcaaagtccaccgggggaggctgctggtaaacattaaccaaggtcaccccagttatcagaggagcaaacaggggcaaagtccaccgggggaggctgctggtaaacattaaccaaggtcaccccagttatcagaggagcaaacaggggcaaagtccaccgggggaggctgctggtaaacattaaccaaggtcaccccagttatcagaggagcaaacaggggcaaagtccaccgggggaggctgctggtaaacattaaccaaggtcaccccagttatcagaggagcaaacaggggcaaagtccaccgggggaggctgctggtaaacattaaccaaggtcaccccagttatcagaggagcaaacaggggcaaagtccaccgggggaggctgctggtaaacattaaccaaggtcaccccagttatcagaggagcaaacaggggcaaagtccaccgggggaggctgctggtaaacattaaccaaggtcaccccagttatcagaggagcaaacaggggcaaagtccaccgggggaggctgctggtaaacattaaccaaggtcaccccagttatcagaggagcaaacaggggcaaagtccac

SEQ ID NO: 587 - DNA, 719 bp, Artificial Sequence
  Description of Artificial Sequence: Synthetic polynucleotide
gagggaggctgctggtaaacattaaccaaggtcacccagttatcagaggagcaaacaggggcaaagtccaccgagggaggctgctggtaaacattaaccaaggtcacccagttatcagaggagcaaacaggggcaaagtccaccgagggaggctgctggtaaacattaaccaaggtcacccagttatcagaggagcaaacaggggcaaagtccaccgagggaggctgctggtaaacattaaccaaggtcacccagttatcagaggagcaaacaggggcaaagtccaccgagggaggctgctggtaaacattaaccaaggtcacccagttatcagaggagcaaacaggggcaaagtccaccgagggaggctgctggtaaacattaaccaaggtcacccagttatcagaggagcaaacaggggcaaagtccaccgagggaggctgctggtaaacattaaccaaggtcacccagttatcagaggagcaaacaggggcaaagtccaccgagggaggctgctggtaaacattaaccaaggtcacccagttatcagaggagcaaacaggggcaaagtccaccgagggaggctgctggtaaacattaaccaaggtcacccagttatcagaggagcaaacaggggcaaagtccaccgagggaggctgctggtaaacattaaccaaggtcacccagttatcagaggagcaaacaggggcaaagtccac

SEQ ID NO: 588 - DNA, 718 bp, Artificial Sequence
  Description of Artificial Sequence: Synthetic polynucleotide
agggaggctgctggtaaacattaaccaaggtcacccagttatcagaggagcaaacaggggcaaagtccacagagggaggctgctggtaaacattaaccaaggtcacccagttatcagaggagcaaacaggggcaaagtccacagagggaggctgctggtaaacattaaccaaggtcacccagttatcagaggagcaaacaggggcaaagtccacagagggaggctgctggtaaacattaaccaaggtcacccagttatcagaggagcaaacaggggcaaagtccacagagggaggctgctggtaaacattaaccaaggtcacccagttatcagaggagcaaacaggggcaaagtccacagagggaggctgctggtaaacattaaccaaggtcacccagttatcagaggagcaaacaggggcaaagtccacagagggaggctgctggtaaacattaaccaaggtcacccagttatcagaggagcaaacaggggcaaagtccacagagggaggctgctggtaaacattaaccaaggtcacccagttatcagaggagcaaacaggggcaaagtccacagagggaggctgctggtaaacattaaccaaggtcacccagttatcagaggagcaaacaggggcaaagtccacagagggaggctgctggtaaacattaaccaaggtcacccagttatcagaggagcaaacaggggcaaagtccat

SEQ ID NO: 589 - DNA, 729 bp, Artificial Sequence
  Description of Artificial Sequence: Synthetic polynucleotide
gggggaggctgctggtaaacattaaccaaggtcacctcagttatcagaggagcaaacagggacaaagtccaccgggggaggctgctggtaaacattaaccaaggtcacctcagttatcagaggagcaaacagggacaaagtccaccgggggaggctgctggtaaacattaaccaaggtcacctcagttatcagaggagcaaacagggacaaagtccaccgggggaggctgctggtaaacattaaccaaggtcacctcagttatcagaggagcaaacagggacaaagtccaccgggggaggctgctggtaaacattaaccaaggtcacctcagttatcagaggagcaaacagggacaaagtccaccgggggaggctgctggtaaacattaaccaaggtcacctcagttatcagaggagcaaacagggacaaagtccaccgggggaggctgctggtaaacattaaccaaggtcacctcagttatcagaggagcaaacagggacaaagtccaccgggggaggctgctggtaaacattaaccaaggtcacctcagttatcagaggagcaaacagggacaaagtccaccgggggaggctgctggtaaacattaaccaaggtcacctcagttatcagaggagcaaacagggacaaagtccaccgggggaggctgctggtaaacattaaccaaggtcacctcagttatcagaggagcaaacagggacaaagtccac

SEQ ID NO: 590 - DNA, 730 bp, Artificial Sequence
  Description of Artificial Sequence: Synthetic polynucleotide
aggggaggctgctggtaaacattaaccaaggtcacctcagttatcagaggagcaaacagggacaaagtccacagggggaggctgctggtaaacattaaccaaggtcacctcagttatcagaggagcaaacagggacaaagtccacagggggaggctgctggtaaacattaaccaaggtcacctcagttatcagaggagcaaacagggacaaagtccacagggggaggctgctggtaaacattaaccaaggtcacctcagttatcagaggagcaaacagggacaaagtccacagggggaggctgctggtaaacattaaccaaggtcacctcagttatcagaggagcaaacagggacaaagtccacagggggaggctgctggtaaacattaaccaaggtcacctcagttatcagaggagcaaacagggacaaagtccacagggggaggctgctggtaaacattaaccaaggtcacctcagttatcagaggagcaaacagggacaaagtccacagggggaggctgctggtaaacattaaccaaggtcacctcagttatcagaggagcaaacagggacaaagtccacagggggaggctgctggtaaacattaaccaaggtcacctcagttatcagaggagcaaacagggacaaagtccacagggggaggctgctggtaaacattaaccaaggtcacctcagttatcagaggagcaaacagggacaaagtccaca

SEQ ID NO: 591 - DNA, 709 bp, Artificial Sequence
  Description of Artificial Sequence: Synthetic polynucleotide
gggaggctgctggtaaacattaaccaaggtcaccccagttatcagaggagcaaacaagggcaaagtccaccgggaggctgctggtaaacattaaccaaggtcaccccagttatcagaggagcaaacaagggcaaagtccaccgggaggctgctggtaaacattaaccaaggtcaccccagttatcagaggagcaaacaagggcaaagtccaccgggaggctgctggtaaacattaaccaaggtcaccccagttatcagaggagcaaacaagggcaaagtccaccgggaggctgctggtaaacattaaccaaggtcaccccagttatcagaggagcaaacaagggcaaagtccaccgggaggctgctggtaaacattaaccaaggtcaccccagttatcagaggagcaaacaagggcaaagtccaccgggaggctgctggtaaacattaaccaaggtcaccccagttatcagaggagcaaacaagggcaaagtccaccgggaggctgctggtaaacattaaccaaggtcaccccagttatcagaggagcaaacaagggcaaagtccaccgggaggctgctggtaaacattaaccaaggtcaccccagttatcagaggagcaaacaagggcaaagtccaccgggaggctgctggtaaacattaaccaaggtcaccccagttatcagaggagcaaacaagggcaaagtccac

SEQ ID NO: 592 - DNA, 711 bp, Artificial Sequence
  Description of Artificial Sequence: Synthetic polynucleotide
agggaggctgctggtaaacattaaccaaggtcaccccagttatcagaggagcaaacaagggcaaagtccacagggaggctgctggtaaacattaaccaaggtcaccccagttatcagaggagcaaacaagggcaaagtccacagggaggctgctggtaaacattaaccaaggtcaccccagttatcagaggagcaaacaagggcaaagtccacagggaggctgctggtaaacattaaccaaggtcaccccagttatcagaggagcaaacaagggcaaagtccacagggaggctgctggtaaacattaaccaaggtcaccccagttatcagaggagcaaacaagggcaaagtccacagggaggctgctggtaaacattaaccaaggtcaccccagttatcagaggagcaaacaagggcaaagtccacagggaggctgctggtaaacattaaccaaggtcaccccagttatcagaggagcaaacaagggcaaagtccacagggaggctgctggtaaacattaaccaaggtcaccccagttatcagaggagcaaacaagggcaaagtccacagggaggctgctggtaaacattaaccaaggtcaccccagttatcagaggagcaaacaagggcaaagtccacagggaggctgctggtaaacattaaccaaggtcaccccagttatcagaggagcaaacaagggcaaagtccaca

SEQ ID NO: 593 - DNA, 729 bp, Artificial Sequence
  Description of Artificial Sequence: Synthetic polynucleotide
gggggaggctgctggtgaatattaaccaaggtcaccccagttatcggaggagcaaacaggggctaagtccaccgggggaggctgctggtgaatattaaccaaggtcaccccagttatcggaggagcaaacaggggctaagtccaccgggggaggctgctggtgaatattaaccaaggtcaccccagttatcggaggagcaaacaggggctaagtccaccgggggaggctgctggtgaatattaaccaaggtcaccccagttatcggaggagcaaacaggggctaagtccaccgggggaggctgctggtgaatattaaccaaggtcaccccagttatcggaggagcaaacaggggctaagtccaccgggggaggctgctggtgaatattaaccaaggtcaccccagttatcggaggagcaaacaggggctaagtccaccgggggaggctgctggtgaatattaaccaaggtcaccccagttatcggaggagcaaacaggggctaagtccaccgggggaggctgctggtgaatattaaccaaggtcaccccagttatcggaggagcaaacaggggctaagtccaccgggggaggctgctggtgaatattaaccaaggtcaccccagttatcggaggagcaaacaggggctaagtccaccgggggaggctgctggtgaatattaaccaaggtcaccccagttatcggaggagcaaacaggggctaagtccac

SEQ ID NO: 594 - DNA, 709 bp, Artificial Sequence
  Description of Artificial Sequence: Synthetic polynucleotide
aggggaagctactggtgaatattaaccaaggtcacccagttatcagggagcaaacaggagctaagtccatagggggaagctactggtgaatattaaccaaggtcacccagttatcagggagcaaacaggagctaagtccatagggggaagctactggtgaatattaaccaaggtcacccagttatcagggagcaaacaggagctaagtccatagggggaagctactggtgaatattaaccaaggtcacccagttatcagggagcaaacaggagctaagtccatagggggaagctactggtgaatattaaccaaggtcacccagttatcagggagcaaacaggagctaagtccatagggggaagctactggtgaatattaaccaaggtcacccagttatcagggagcaaacaggagctaagtccatagggggaagctactggtgaatattaaccaaggtcacccagttatcagggagcaaacaggagctaagtccatagggggaagctactggtgaatattaaccaaggtcacccagttatcagggagcaaacaggagctaagtccatagggggaagctactggtgaatattaaccaaggtcacccagttatcagggagcaaacaggagctaagtccatagggggaagctactggtgaatattaaccaaggtcacccagttatcagggagcaaacaggagctaagtccat

SEQ ID NO: 595 - DNA, 216 bp, Artificial Sequence
  Description of Artificial Sequence: Synthetic polynucleotide
gggggaagctactggtgaatattaaccaaggtcacccagttatcagggagcaaacaggagctaagtccatagggggaggctgctggtaaacattaaccaaggtcaccccagttatcagaggagcaaacaggggcaaagtccacagagggaggctgctggtgaatattaaccaaggtcacctcagttatcagaggagcaaacaggggcaaagtccat

SEQ ID NO: 596 - DNA, 217 bp, Artificial Sequence
  Description of Artificial Sequence: Synthetic polynucleotide
agagggaggctgctggtgaatattaaccaaggtcacctcagttatcagaggagcaaacaggggcaaagtccatagagggaagctactggtgaatattaaccaaggtcacccagttatcagggagcaaacaggagctaagtccatagggggaggctgctggtaaacattaaccaaggtcaccccagttatcagaggagcaaacaggggcaaagtccac

SEQ ID NO: 597 - DNA, 220 bp, Artificial Sequence
  Description of Artificial Sequence: Synthetic polynucleotide
gggggaggctgctggtgaatattaaccaaggtcaccccagttatcggaggagcaaacaggggctaagtccacaagggggaggctgctggtgaatattaaccaaggtcaccccagttatcggaggagcaaacaggggctaagtccaccagggggaggctgctggtgaatattaaccaaggtcaccccagttatcggaggagcaaacaggggctaagtccac

SEQ ID NO: 598 - DNA, 220 bp, Artificial Sequence
  Description of Artificial Sequence: Synthetic polynucleotide
gggggaggctgctggtgaatattaaccaaggtcaccccagttatcggaggagcaaacaggggctaagtccacaagggggaggctgctggtgaatattaaccaaggtcaccccagttatcggaggagcaaacaggggctaagtccacttgggggaggctgctggtgaatattaaccaaggtcaccccagttatcggaggagcaaacaggggctaagtccac

SEQ ID NO: 599 - DNA, 220 bp, Artificial Sequence
  Description of Artificial Sequence: Synthetic polynucleotide
gggggaggctgctggtgaatattaaccaaggtcaccccagttatcggaggagcaaacaggggctaagtccaccagggggaggctgctggtgaatattaaccaaggtcaccccagttatcggaggagcaaacaggggctaagtccacttgggggaggctgctggtgaatattaaccaaggtcaccccagttatcggaggagcaaacaggggctaagtccac

SEQ ID NO: 600 - DNA, 220 bp, Artificial Sequence
  Description of Artificial Sequence: Synthetic polynucleotide
gggggaggctgctggtgaatattaaccaaggtcaccccagttatcggaggagcaaacaggggctaagtccacctgggggaggctgctggtgaatattaaccaaggtcaccccagttatcggaggagcaaacaggggctaagtccacaagggggaggctgctggtgaatattaaccaaggtcaccccagttatcggaggagcaaacaggggctaagtccac

SEQ ID NO: 601 - DNA, 220 bp, Artificial Sequence
  Description of Artificial Sequence: Synthetic polynucleotide
gggggaggctgctggtgaatattaaccaaggtcaccccagttatcggaggagcaaacaggggctaagtccacctgggggaggctgctggtgaatattaaccaaggtcaccccagttatcggaggagcaaacaggggctaagtccaccagggggaggctgctggtgaatattaaccaaggtcaccccagttatcggaggagcaaacaggggctaagtccac

SEQ ID NO: 602 - DNA, 220 bp, Artificial Sequence
  Description of Artificial Sequence: Synthetic polynucleotide
gggggaggctgctggtgaatattaaccaaggtcaccccagttatcggaggagcaaacaggggctaagtccacctgggggaggctgctggtgaatattaaccaaggtcaccccagttatcggaggagcaaacaggggctaagtccacttgggggaggctgctggtgaatattaaccaaggtcaccccagttatcggaggagcaaacaggggctaagtccac

SEQ ID NO: 603 - DNA, 220 bp, Artificial Sequence
  Description of Artificial Sequence: Synthetic polynucleotide
gggggaggctgctggtgaatattaaccaaggtcaccccagttatcggaggagcaaacaggggctaagtccacttgggggaggctgctggtgaatattaaccaaggtcaccccagttatcggaggagcaaacaggggctaagtccacaagggggaggctgctggtgaatattaaccaaggtcaccccagttatcggaggagcaaacaggggctaagtccac

SEQ ID NO: 604 - DNA, 222 bp, Artificial Sequence
  Description of Artificial Sequence: Synthetic polynucleotide
gggggaggctgctggtgaatattaaccaaggtcaccccagttatcggaggagcaaacaggggctaagtccacttagggggaggctgctggtgaatattaaccaaggtcaccccagttatcggaggagcaaacaggggctaagtccactgtgggggaggctgctggtgaatattaaccaaggtcaccccagttatcggaggagcaaacaggggctaagtccac

SEQ ID NO: 605 - DNA, 222 bp, Artificial Sequence
  Description of Artificial Sequence: Synthetic polynucleotide
gggggaggctgctggtgaatattaaccaaggtcaccccagttatcggaggagcaaacaggggctaagtccacagagggggaggctgctggtgaatattaaccaaggtcaccccagttatcggaggagcaaacaggggctaagtccactgagggggaggctgctggtgaatattaaccaaggtcaccccagttatcggaggagcaaacaggggctaagtccac

SEQ ID NO: 606 - DNA, 226 bp, Artificial Sequence
  Description of Artificial Sequence: Synthetic polynucleotide
gggggaggctgctggtgaatattaaccaaggtcaccccagttatcggaggagcaaacaggggctaagtccacacatagggggaggctgctggtgaatattaaccaaggtcaccccagttatcggaggagcaaacaggggctaagtccacctgtagggggaggctgctggtgaatattaaccaaggtcaccccagttatcggaggagcaaacaggggctaagtccac

SEQ ID NO: 607 - DNA, 226 bp, Artificial Sequence
  Description of Artificial Sequence: Synthetic polynucleotide
gggggaggctgctggtgaatattaaccaaggtcaccccagttatcggaggagcaaacaggggctaagtccacaacaagggggaggctgctggtgaatattaaccaaggtcaccccagttatcggaggagcaaacaggggctaagtccaccatcagggggaggctgctggtgaatattaaccaaggtcaccccagttatcggaggagcaaacaggggctaagtccac

SEQ ID NO: 608 - DNA, 226 bp, Artificial Sequence
  Description of Artificial Sequence: Synthetic polynucleotide
gggggaggctgctggtgaatattaaccaaggtcaccccagttatcggaggagcaaacaggggctaagtccaccaattgggggaggctgctggtgaatattaaccaaggtcaccccagttatcggaggagcaaacaggggctaagtccacttgctgggggaggctgctggtgaatattaaccaaggtcaccccagttatcggaggagcaaacaggggctaagtccac

SEQ ID NO: 609 - DNA, 238 bp, Artificial Sequence
  Description of Artificial Sequence: Synthetic polynucleotide
gggggaggctgctggtgaatattaaccaaggtcaccccagttatcggaggagcaaacaggggctaagtccacccttgggaccagggggaggctgctggtgaatattaaccaaggtcaccccagttatcggaggagcaaacaggggctaagtccacaagctgttccagggggaggctgctggtgaatattaaccaaggtcaccccagttatcggaggagcaaacaggggctaagtccac

SEQ ID NO: 610 - DNA, 238 bp, Artificial Sequence
  Description of Artificial Sequence: Synthetic polynucleotide
gggggaggctgctggtgaatattaaccaaggtcaccccagttatcggaggagcaaacaggggctaagtccacaggctggttgagggggaggctgctggtgaatattaaccaaggtcaccccagttatcggaggagcaaacaggggctaagtccactgataatagctgggggaggctgctggtgaatattaaccaaggtcaccccagttatcggaggagcaaacaggggctaagtccac

SEQ ID NO: 611 - DNA, 238 bp, Artificial Sequence
  Description of Artificial Sequence: Synthetic polynucleotide
gggggaggctgctggtgaatattaaccaaggtcaccccagttatcggaggagcaaacaggggctaagtccaccattctgctttgggggaggctgctggtgaatattaaccaaggtcaccccagttatcggaggagcaaacaggggctaagtccacttgattaagaagggggaggctgctggtgaatattaaccaaggtcaccccagttatcggaggagcaaacaggggctaagtccac

SEQ ID NO: 612 - DNA, 238 bp, Artificial Sequence
  Description of Artificial Sequence: Synthetic polynucleotide
gggggaggctgctggtgaatattaaccaaggtcaccccagttatcggaggagcaaacaggggctaagtccacaacaaagtccagggggaggctgctggtgaatattaaccaaggtcaccccagttatcggaggagcaaacaggggctaagtccaccttgtaaacaagggggaggctgctggtgaatattaaccaaggtcaccccagttatcggaggagcaaacaggggctaagtccac

SEQ ID NO: 613 - DNA, 238 bp, Artificial Sequence
  Description of Artificial Sequence: Synthetic polynucleotide
gggggaggctgctggtgaatattaaccaaggtcaccccagttatcggaggagcaaacaggggctaagtccactgcaaagtcctgggggaggctgctggtgaatattaaccaaggtcaccccagttatcggaggagcaaacaggggctaagtccacagtgtttacaagggggaggctgctggtgaatattaaccaaggtcaccccagttatcggaggagcaaacaggggctaagtccac

SEQ ID NO: 614 - DNA, 238 bp, Artificial Sequence
  Description of Artificial Sequence: Synthetic polynucleotide
gggggaggctgctggtgaatattaaccaaggtcaccccagttatcggaggagcaaacaggggctaagtccacaggactttgaagggggaggctgctggtgaatattaaccaaggtcaccccagttatcggaggagcaaacaggggctaagtccacagtgtaaacaagggggaggctgctggtgaatattaaccaaggtcaccccagttatcggaggagcaaacaggggctaagtccac

SEQ ID NO: 615 - DNA, 238 bp, Artificial Sequence
  Description of Artificial Sequence: Synthetic polynucleotide
gggggaggctgctggtgaatattaaccaaggtcaccccagttatcggaggagcaaacaggggctaagtccactggactttggtgggggaggctgctggtgaatattaaccaaggtcaccccagttatcggaggagcaaacaggggctaagtccactctgtttacaagggggaggctgctggtgaatattaaccaaggtcaccccagttatcggaggagcaaacaggggctaagtccac

SEQ ID NO: 616 - DNA, 276 bp, Artificial Sequence
  Description of Artificial Sequence: Synthetic polynucleotide
gggggaggctgctggtgaatattaaccaaggtcaccccagttatcggaggagcaaacaggggctaagtccacctgcttgacatctgcagtaatctttgattagggggaggctgctggtgaatattaaccaaggtcaccccagttatcggaggagcaaacaggggctaagtccacctctgatactttgatatctagtctactgctgggggaggctgctggtgaatattaaccaaggtcaccccagttatcggaggagcaaacaggggctaagtccac

SEQ ID NO: 617 - DNA, 69 bp, Artificial Sequence
  Description of Artificial Sequence: Synthetic oligonucleotide
ggaggctgttggtgaatattaaccaaggtcacctcagttatcggaggagcaaacaagggctaagtccac

SEQ ID NO: 618 - DNA, 541 bp, Artificial Sequence
  Description of Artificial Sequence: Synthetic polynucleotide
gggggaggctgctggtaaacattaaccaaggtcacctcagttatcagaggagcaaacagggacaaagtccaccgggggaggctgctggtaaacattaaccaaggtcacctcagttatcagaggagcaaacagggacaaagtccaccgggggaggctgctggtaaacattaaccaaggtcacctcagttatcagaggagcaaacagggacaaagtccacggtacccactgggaggatgttgagtaagatggaaaactactgatgacccttgcagagacagagtattaggacatgtttgaacaggggccgggcgatcagcaggtagctctagaggatccccgtctgtctgcacatttcgtagagcgagtgttccgatactctaatctccctaggcaaggttcatatttgtgtaggttacttattctccttttgttgactaagtcaataatcagaatcagcaggtttggagtcagcttggcagggatcagcagcctgggttggaaggagggggtataaaagccccttcaccaggagaagccgtc

SEQ ID NO: 619 - DNA, 542 bp, Artificial Sequence
  Description of Artificial Sequence: Synthetic polynucleotide
aggggaggctgctggtaaacattaaccaaggtcacctcagttatcagaggagcaaacagggacaaagtccacagggggaggctgctggtaaacattaaccaaggtcacctcagttatcagaggagcaaacagggacaaagtccacagggggaggctgctggtaaacattaaccaaggtcacctcagttatcagaggagcaaacagggacaaagtccacaggtacccactgggaggatgttgagtaagatggaaaactactgatgacccttgcagagacagagtattaggacatgtttgaacaggggccgggcgatcagcaggtagctctagaggatccccgtctgtctgcacatttcgtagagcgagtgttccgatactctaatctccctaggcaaggttcatatttgtgtaggttacttattctccttttgttgactaagtcaataatcagaatcagcaggtttggagtcagcttggcagggatcagcagcctgggttggaaggagggggtataaaagccccttcaccaggagaagccgtc

SEQ ID NO: 620 - DNA, 535 bp, Artificial Sequence
  Description of Artificial Sequence: Synthetic polynucleotide
aggggaagctactggtgaatattaaccaaggtcacccagttatcagggagcaaacaggagctaagtccatagggggaagctactggtgaatattaaccaaggtcacccagttatcagggagcaaacaggagctaagtccatagggggaagctactggtgaatattaaccaaggtcacccagttatcagggagcaaacaggagctaagtccatggtacccactgggaggatgttgagtaagatggaaaactactgatgacccttgcagagacagagtattaggacatgtttgaacaggggccgggcgatcagcaggtagctctagaggatccccgtctgtctgcacatttcgtagagcgagtgttccgatactctaatctccctaggcaaggttcatatttgtgtaggttacttattctccttttgttgactaagtcaataatcagaatcagcaggtttggagtcagcttggcagggatcagcagcctgggttggaaggagggggtataaaagccccttcaccaggagaagccgtc

SEQ ID NO: 621 - DNA, 539 bp, Artificial Sequence
  Description of Artificial Sequence: Synthetic polynucleotide
gggggaagctactggtgaatattaaccaaggtcacccagttatcagggagcaaacaggagctaagtccatagggggaggctgctggtaaacattaaccaaggtcaccccagttatcagaggagcaaacaggggcaaagtccacagagggaggctgctggtgaatattaaccaaggtcacctcagttatcagaggagcaaacaggggcaaagtccatggtacccactgggaggatgttgagtaagatggaaaactactgatgacccttgcagagacagagtattaggacatgtttgaacaggggccgggcgatcagcaggtagctctagaggatccccgtctgtctgcacatttcgtagagcgagtgttccgatactctaatctccctaggcaaggttcatatttgtgtaggttacttattctccttttgttgactaagtcaataatcagaatcagcaggtttggagtcagcttggcagggatcagcagcctgggttggaaggagggggtataaaagccccttcaccaggagaagccgtc

SEQ ID NO: 622 - DNA, 540 bp, Artificial Sequence
  Description of Artificial Sequence: Synthetic polynucleotide
agagggaggctgctggtgaatattaaccaaggtcacctcagttatcagaggagcaaacaggggcaaagtccatagagggaagctactggtgaatattaaccaaggtcacccagttatcagggagcaaacaggagctaagtccatagggggaggctgctggtaaacattaaccaaggtcaccccagttatcagaggagcaaacaggggcaaagtccacggtacccactgggaggatgttgagtaagatggaaaactactgatgacccttgcagagacagagtattaggacatgtttgaacaggggccgggcgatcagcaggtagctctagaggatccccgtctgtctgcacatttcgtagagcgagtgttccgatactctaatctccctaggcaaggttcatatttgtgtaggttacttattctccttttgttgactaagtcaataatcagaatcagcaggtttggagtcagcttggcagggatcagcagcctgggttggaaggagggggtataaaagccccttcaccaggagaagccgtc

SEQ ID NO: 623 - DNA, 532 bp, Artificial Sequence
  Description of Artificial Sequence: Synthetic polynucleotide
ggaggctgttggtgaatattaaccaaggtcacctcagttatcggaggagcaaacaagggctaagtccaccggaggctgttggtgaatattaaccaaggtcacctcagttatcggaggagcaaacaagggctaagtccaccggaggctgttggtgaatattaaccaaggtcacctcagttatcggaggagcaaacaagggctaagtccacggtacccactgggaggatgttgagtaagatggaaaactactgatgacccttgcagagacagagtattaggacatgtttgaacaggggccgggcgatcagcaggtagctctagaggatccccgtctgtctgcacatttcgtagagcgagtgttccgatactctaatctccctaggcaaggttcatatttgtgtaggttacttattctccttttgttgactaagtcaataatcagaatcagcaggtttggagtcagcttggcagggatcagcagcctgggttggaaggagggggtataaaagccccttcaccaggagaagccgtc

SEQ ID NO: 624 - DNA, 534 bp, Artificial Sequence
  Description of Artificial Sequence: Synthetic polynucleotide
aggaggctgttggtgaatattaaccaaggtcacctcagttatcagaggagcaaacaagggctaagtccacaggaggctgttggtgaatattaaccaaggtcacctcagttatcagaggagcaaacaagggctaagtccacaggaggctgttggtgaatattaaccaaggtcacctcagttatcagaggagcaaacaagggctaagtccacaggtacccactgggaggatgttgagtaagatggaaaactactgatgacccttgcagagacagagtattaggacatgtttgaacaggggccgggcgatcagcaggtagctctagaggatccccgtctgtctgcacatttcgtagagcgagtgttccgatactctaatctccctaggcaaggttcatatttgtgtaggttacttattctccttttgttgactaagtcaataatcagaatcagcaggtttggagtcagcttggcagggatcagcagcctgggttggaaggagggggtataaaagccccttcaccaggagaagccgtc

SEQ ID NO: 625 - DNA, 72 bp, Artificial Sequence
  Description of Artificial Sequence: Synthetic oligonucleotide
gggggaggctgctggtaaacattaaccaaggtcaccccagttatcagaggagcaaacaggggcaaagtccac

SEQ ID NO: 626 - DNA, 4392 bp, Artificial Sequence
  Description of Artificial Sequence: Synthetic polynucleotide
atgcagattgagctgagcacctgcttcttcctgtgcctgctgaggttctgcttctctgccaccaggagatactacctgggggctgtggagctgagctgggactacatgcagtctgacctgggggagctgcctgtggacgccaggttcccccccagagtgcccaagagcttccccttcaacacctctgtggtgtacaagaagaccctgtttgtggagttcactgaccacctgttcaacattgccaagcccaggcccccctggatgggcctgctgggccccaccatccaggctgaggtgtatgacactgtggtgatcaccctgaagaacatggccagccaccctgtgagcctgcatgctgtgggggtgagctactggaaggcctctgagggggctgagtatgatgaccagaccagccagagggagaaggaggatgacaaggtgttccctgggggcagccacacctatgtgtggcaggtgctgaaggagaatggccccatggcctctgaccccctgtgcctgacctacagctacctgagccatgtggacctggtgaaggacctgaactctggcctgattggggccctgctggtgtgcagggagggcagcctggccaaggagaagacccagaccctgcacaagttcatcctgctgtttgctgtgtttgatgagggcaagagctggcactctgaaaccaagaacagcctgatgcaggacagggatgctgcctctgccagggcctggcccaagatgcacactgtgaatggctatgtgaacaggagcctgcctggcctgattggctgccacaggaagtctgtgtactggcatgtgattggcatgggcaccacccctgaggtgcacagcatcttcctggagggccacaccttcctggtcaggaaccacaggcaggccagcctggagatcagccccatcaccttcctgactgcccagaccctgctgatggacctgggccagttcctgctgttctgccacatcagcagccaccagcatgatggcatggaggcctatgtgaaggtggacagctgccctgaggagccccagctgaggatgaagaacaatgaggaggctgaggactatgatgatgacctgactgactctgagatggatgtggtgaggtttgatgatgacaacagccccagcttcatccagatcaggtctgtggccaagaagcaccccaagacctgggtgcactacattgctgctgaggaggaggactgggactatgcccccctggtgctggcccctgatgacaggagctacaagagccagtacctgaacaatggcccccagaggattggcaggaagtacaagaaggtcaggttcatggcctacactgatgaaaccttcaagaccagggaggccatccagcatgagtctggcatcctgggccccctgctgtatggggaggtgggggacaccctgctgatcatcttcaagaaccaggccagcaggccctacaacatctacccccatggcatcactgatgtgaggcccctgtacagcaggaggctgcccaagggggtgaagcacctgaaggacttccccatcctgcctggggagatcttcaagtacaagtggactgtgactgtggaggatggccccaccaagtctgaccccaggtgcctgaccagatactacagcagctttgtgaacatggagagggacctggcctctggcctgattggccccctgctgatctgctacaaggagtctgtggaccagaggggcaaccagatcatgtctgacaagaggaatgtgatcctgttctctgtgtttgatgagaacaggagctggtacctgactgagaacatccagaggttcctgcccaaccctgctggggtgcagctggaggaccctgagttccaggccagcaacatcatgcacagcatcaatggctatgtgtttgacagcctgcagctgtctgtgtgcctgcatgaggtggcctactggtacatcctgagcattggggcccagactgacttcctgtctgtgttcttctctggctacaccttcaagcacaagatggtgtatgaggacaccctgaccctgttccccttctctggggagactgtgttcatgagcatggagaaccctggcctgtggattctgggctgccacaactctgacttcaggaacaggggcatgactgccctgctgaaagtctccagctgtgacaagaacactggggactactatgaggacagctatgaggacatctctgcctacctgctgagcaagaacaatgccattgagcccaggagcttcagccagaatagcaggcaccccagcaccaggcagaagcagttcaatgccaccaccatcccagagaataccaccctgcagtctgaccaggaggagattgactatgatgacaccatctctgtggagatgaagaaggaggactttgacatctacgacgaggacgagaaccagagccccaggagcttccagaagaagaccaggcactacttcattgctgctgtggagaggctgtgggactatggcatgagcagcagcccccatgtgctgaggaacagggcccagtctggctctgtgccccagttcaagaaggtggtgttccaggagttcactgatggcagcttcacccagcccctgtacagaggggagctgaatgagcacctgggcctgctgggcccctacatcagggctgaggtggaggacaacatcatggtgaccttcaggaaccaggccagcaggccctacagcttctacagcagcctgatcagctatgaggaggaccagaggcagggggctgagcccaggaagaactttgtgaagcccaatgaaaccaagacctacttctggaaggtgcagcaccacatggcccccaccaaggatgagtttgactgcaaggcctgggcctacttctctgatgtggacctggagaaggatgtgcactctggcctgattggccccctgctggtgtgccacaccaacaccctgaaccctgcccatggcaggcaggtgactgtgcaggagtttgccctgttcttcaccatctttgatgaaaccaagagctggtacttcactgagaacatggagaggaactgcagggccccctgcaacatccagatggaggaccccaccttcaaggagaactacaggttccatgccatcaatggctacatcatggacaccctgcctggcctggtgatggcccaggaccagaggatcaggtggtacctgctgagcatgggcagcaatgagaacatccacagcatccacttctctggccatgtgttcactgtgaggaagaaggaggagtacaagatggccctgtacaacctgtaccctggggtgtttgagactgtggagatgctgcccagcaaggctggcatctggagggtggagtgcctgattggggagcacctgcatgctggcatgagcaccctgttcctggtgtacagcaacaagtgccagacccccctgggcatggcctctggccacatcagggacttccagatcactgcctctggccagtatggccagtgggcccccaagctggccaggctgcactactctggcagcatcaatgcctggagcaccaaggagcccttcagctggatcaaggtggacctgctggcccccatgatcatccatggcatcaagacccagggggccaggcagaagttcagcagcctgtacatcagccagttcatcatcatgtacagcctggatggcaagaagtggcagacctacaggggcaacagcactggcaccctgatggtgttctttggcaatgtggacagctctggcatcaagcacaacatcttcaacccccccatcattgccagatacatcaggctgcaccccacccactacagcatcaggagcaccctgaggatggagctgatgggctgtgacctgaacagctgcagcatgcccctgggcatggagagcaaggccatctctgatgcccagatcactgccagcagctacttcaccaacatgtttgccacctggagccccagcaaggccaggctgcacctgcagggcaggagcaatgcctggaggccccaggtcaacaaccccaaggagtggctgcaggtggacttccagaagaccatgaaggtgactggggtgaccacccagggggtgaagagcctgctgaccagcatgtatgtgaaggagttcctgatcagcagcagccaggatggccaccagtggaccctgttcttccagaatggcaaggtgaaggtgttccagggcaaccaggacagcttcacccctgtggtgaacagcctggacccccccctgctgaccagatacctgaggattcacccccagagctgggtgcaccagattgccctgaggatggaggtgctgggctgtgaggcccaggacctgtactga

SEQ ID NO: 627 - DNA, 4392 bp, Artificial Sequence
  Description of Artificial Sequence: Synthetic polynucleotide
atgcagattgagctgagcacctgcttcttcctgtgcctgctgaggttctgcttctctgccaccaggagatactacctgggggctgtggagctgagctgggactacatgcagtctgacctgggggagctgcctgtggacgccaggttcccccccagagtgcccaagagcttccccttcaacacctctgtggtgtacaagaagaccctgtttgtggagttcactgaccacctgttcaacattgccaagcccaggcccccctggatgggcctgctgggccccaccatccaggctgaggtgtatgacactgtggtgatcaccctgaagaacatggccagccaccctgtgagcctgcatgctgtgggggtgagctactggaaggcctctgagggggctgagtatgatgaccagaccagccagagggagaaggaggatgacaaggtgttccctgggggcagccacacctatgtgtggcaggtgctgaaggagaatggccccatggcctctgaccccctgtgcctgacctacagctacctgagccatgtggacctggtgaaggacctgaactctggcctgattggggccctgctggtgtgcagggagggcagcctggccaaggagaagacccagaccctgcacaagttcatcctgctgtttgctgtgtttgatgagggcaagagctggcactctgaaaccaagaacagcctgatgcaggacagggatgctgcctctgccagggcctggcccaagatgcacactgtgaatggctatgtgaacaggagcctgcctggcctgattggctgccacaggaagtctgtgtactggcatgtgattggcatgggcaccacccctgaggtgcacagcatcttcctggagggccacaccttcctggtcaggaaccacaggcaggccagcctggagatcagccccatcaccttcctgactgcccagaccctgctgatggacctgggccagttcctgctgttctgccacatcagcagccaccagcatgatggcatggaggcctatgtgaaggtggacagctgccctgaggagccccagctgaggatgaagaacaatgaggaggctgaggactatgatgatgacctgactgactctgagatggatgtggtgaggtttgatgatgacaacagccccagcttcatccagatcaggtctgtggccaagaagcaccccaagacctgggtgcactacattgctgctgaggaggaggactgggactatgcccccctggtgctggcccctgatgacaggagctacaagagccagtacctgaacaatggcccccagaggattggcaggaagtacaagaaggtcaggttcatggcctacactgatgaaaccttcaagaccagggaggccatccagcatgagtctggcatcctgggccccctgctgtatggggaggtgggggacaccctgctgatcatcttcaagaaccaggccagcaggccctacaacatctacccccacggcatcactgatgtgaggcccctgtacagcaggaggctgcccaagggggtgaagcacctgaaggacttccccatcctgcctggggagatcttcaagtacaagtggactgtgactgtggaggatggccccaccaagtctgaccccaggtgcctgaccagatactacagcagctttgtgaacatggagagggacctggcctctggcctgattggccccctgctgatctgctacaaggagtctgtggaccagaggggcaaccagatcatgtctgacaagaggaatgtgatcctgttctctgtgtttgatgagaacaggagctggtacctgactgagaacatccagaggttcctgcccaaccctgctggggtgcagctggaggaccctgagttccaggccagcaacatcatgcacagcatcaatggctatgtgtttgacagcctgcagctgtctgtgtgcctgcatgaggtggcctactggtacatcctgagcattggggcccagactgacttcctgtctgtgttcttctctggctacaccttcaagcacaagatggtgtatgaggacaccctgaccctgttccccttctctggggagactgtgttcatgagcatggagaaccctggcctgtggattctgggctgccacaactctgacttcaggaacaggggcatgactgccctgctgaaagtctccagctgtgacaagaacactggggactactatgaggacagctatgaggacatctctgcctacctgctgagcaagaacaatgccattgagcccaggagcttcagccagaatagcaggcaccccagcaccaggcagaagcagttcaatgccaccaccatcccagagaataccaccctgcagtctgaccaggaggagattgactatgatgacaccatctctgtggagatgaagaaggaggactttgacatctacgacgaggacgagaaccagagccccaggagcttccagaagaagaccaggcactacttcattgctgctgtggagaggctgtgggactatggcatgagcagcagcccccatgtgctgaggaacagggcccagtctggctctgtgccccagttcaagaaggtggtgttccaggagttcactgatggcagcttcacccagcccctgtacagaggggagctgaatgagcacctgggcctgctgggcccctacatcagggctgaggtggaggacaacatcatggtgaccttcaggaaccaggccagcaggccctacagcttctacagcagcctgatcagctatgaggaggaccagaggcagggggctgagcccaggaagaactttgtgaagcccaatgaaaccaagacctacttctggaaggtgcagcaccacatggcccccaccaaggatgagtttgactgcaaggcctgggcctacttctctgatgtggacctggagaaggatgtgcactctggcctgattggccccctgctggtgtgccacaccaacaccctgaaccctgcccatggcaggcaggtgactgtgcaggagtttgccctgttcttcaccatctttgatgaaaccaagagctggtacttcactgagaacatggagaggaactgcagggccccctgcaacatccagatggaggaccccaccttcaaggagaactacaggttccatgccatcaatggctacatcatggacaccctgcctggcctggtgatggcccaggaccagaggatcaggtggtacctgctgagcatgggcagcaatgagaacatccacagcatccacttctctggccatgtgttcactgtgaggaagaaggaggagtacaagatggccctgtacaacctgtaccctggggtgtttgagactgtggagatgctgcccagcaaggctggcatctggagggtggagtgcctgattggggagcacctgcatgctggcatgagcaccctgttcctggtgtacagcaacaagtgccagacccccctgggcatggcctctggccacatcagggacttccagatcactgcctctggccagtatggccagtgggcccccaagctggccaggctgcactactctggcagcatcaatgcctggagcaccaaggagcccttcagctggatcaaggtggacctgctggcccccatgatcatccatggcatcaagacccagggggccaggcagaagttcagcagcctgtacatcagccagttcatcatcatgtacagcctggatggcaagaagtggcagacctacaggggcaacagcactggcaccctgatggtgttctttggcaatgtggacagctctggcatcaagcacaacatcttcaacccccccatcattgccagatacatcaggctgcaccccacccactacagcatcaggagcaccctgaggatggagctgatgggctgtgacctgaacagctgcagcatgcccctgggcatggagagcaaggccatctctgatgcccagatcactgccagcagctacttcaccaacatgtttgccacctggagccccagcaaggccaggctgcacctgcagggcaggagcaatgcctggaggccccaggtcaacaaccccaaggagtggctgcaggtggacttccagaagaccatgaaggtgactggggtgaccacccagggggtgaagagcctgctgaccagcatgtatgtgaaggagttcctgatcagcagcagccaggatggccaccagtggaccctgttcttccagaatggcaaggtgaaggtgttccagggcaaccaggacagcttcacccctgtggtgaacagcctggacccccccctgctgaccagatacctgaggattcacccccagagctgggtgcaccagattgccctgaggatggaggtgctgggctgtgaggcccaggacctgtactga

SEQ ID NO: 628 - DNA, 4392 bp, Artificial Sequence
  Description of Artificial Sequence: Synthetic polynucleotide
atgcagattgagctgagcacctgcttcttcctgtgcctgctgaggttctgcttctctgccaccaggagatactacctgggggctgtggagctgagctgggactacatgcagtctgacctgggggagctgcctgtggacgccaggttcccccccagagtgcccaagagcttccccttcaacacctctgtggtgtacaagaagaccctgtttgtggagttcactgaccacctgttcaacattgccaagcccaggcccccctggatgggcctgctgggccccaccatccaggctgaggtgtatgacactgtggtgatcaccctgaagaacatggccagccaccctgtgagcctgcatgctgtgggggtgagctactggaaggcctctgagggggctgagtatgatgaccagaccagccagagggagaaggaggatgacaaggtgttccctgggggcagccacacctatgtgtggcaggtgctgaaggagaatggccccatggcctctgaccccctgtgcctgacctacagctacctgagccatgtggacctggtgaaggacctgaactctggcctgattggggccctgctggtgtgcagggagggcagcctggccaaggagaagacccagaccctgcacaagttcatcctgctgtttgctgtgtttgatgagggcaagagctggcactctgaaaccaagaacagcctgatgcaggacagggatgctgcctctgccagggcctggcccaagatgcacactgtgaatggctatgtgaacaggagcctgcctggcctgattggctgccacaggaagtctgtgtactggcatgtgattggcatgggcaccacccctgaggtgcacagcatcttcctggagggccacaccttcctggtcaggaaccacaggcaggccagcctggagatcagccccatcaccttcctgactgcccagaccctgctgatggacctgggccagttcctgctgttctgccacatcagcagccaccagcatgatggcatggaggcctatgtgaaggtggacagctgccctgaggagccccagctgaggatgaagaacaatgaggaggctgaggactatgatgatgacctgactgactctgagatggatgtggtgaggtttgatgatgacaacagccccagcttcatccagatcaggtctgtggccaagaagcaccccaagacctgggtgcactacattgctgctgaggaggaggactgggactatgcccccctggtgctggcccctgatgacaggagctacaagagccagtacctgaacaatggcccccagaggattggcaggaagtacaagaaggtcaggttcatggcctacactgatgaaaccttcaagaccagggaggccatccagcatgagtctggcatcctgggccccctgctgtatggggaggtgggggacaccctgctgatcatcttcaagaaccaggccagcaggccctacaacatctacccccacggcatcactgatgtgaggcccctgtacagcaggaggctgcccaagggggtgaagcacctgaaggacttccccatcctgcctggggagatcttcaagtacaagtggactgtgactgtggaggatggccccaccaagtctgaccccaggtgcctgaccagatactacagcagctttgtgaacatggagagggacctggcctctggcctgattggccccctgctgatctgctacaaggagtctgtggaccagaggggcaaccagatcatgtctgacaagaggaatgtgatcctgttctctgtgtttgatgagaacaggagctggtacctgactgagaacatccagaggttcctgcccaaccctgctggggtgcagctggaggaccctgagttccaggccagcaacatcatgcacagcatcaatggctatgtgtttgacagcctgcagctgtctgtgtgcctgcatgaggtggcctactggtacatcctgagcattggggcccagactgacttcctgtctgtgttcttctctggctacaccttcaagcacaagatggtgtatgaggacaccctgaccctgttccccttctctggggagactgtgttcatgagcatggagaaccctggcctgtggattctgggctgccacaactctgacttcaggaacaggggcatgactgccctgctgaaagtctccagctgtgacaagaacactggggactactacgaggacagctatgaggacatctctgcctacctgctgagcaagaacaatgccattgagcccaggagcttcagccagaatagcaggcaccccagcaccaggcagaagcagttcaatgccaccaccatcccagagaataccaccctgcagtctgaccaggaggagattgactatgatgacaccatctctgtggagatgaagaaggaggactttgacatctacgacgaggacgagaaccagagccccaggagcttccagaagaagaccaggcactacttcattgctgctgtggagaggctgtgggactatggcatgagcagcagcccccatgtgctgaggaacagggcccagtctggctctgtgccccagttcaagaaggtggtgttccaggagttcactgatggcagcttcacccagcccctgtacagaggggagctgaatgagcacctgggcctgctgggcccctacatcagggctgaggtggaggacaacatcatggtgaccttcaggaaccaggccagcaggccctacagcttctacagcagcctgatcagctatgaggaggaccagaggcagggggctgagcccaggaagaactttgtgaagcccaatgaaaccaagacctacttctggaaggtgcagcaccacatggcccccaccaaggatgagtttgactgcaaggcctgggcctacttctctgatgtggacctggagaaggatgtgcactctggcctgattggccccctgctggtgtgccacaccaacaccctgaaccctgcccatggcaggcaggtgactgtgcaggagtttgccctgttcttcaccatctttgatgaaaccaagagctggtacttcactgagaacatggagaggaactgcagggccccctgcaacatccagatggaggaccccaccttcaaggagaactacaggttccatgccatcaatggctacatcatggacaccctgcctggcctggtgatggcccaggaccagaggatcaggtggtacctgctgagcatgggcagcaatgagaacatccacagcatccacttctctggccatgtgttcactgtgaggaagaaggaggagtacaagatggccctgtacaacctgtaccctggggtgtttgagactgtggagatgctgcccagcaaggctggcatctggagggtggagtgcctgattggggagcacctgcatgctggcatgagcaccctgttcctggtgtacagcaacaagtgccagacccccctgggcatggcctctggccacatcagggacttccagatcactgcctctggccagtatggccagtgggcccccaagctggccaggctgcactactctggcagcatcaatgcctggagcaccaaggagcccttcagctggatcaaggtggacctgctggcccccatgatcatccatggcatcaagacccagggggccaggcagaagttcagcagcctgtacatcagccagttcatcatcatgtacagcctggatggcaagaagtggcagacctacaggggcaacagcactggcaccctgatggtgttctttggcaatgtggacagctctggcatcaagcacaacatcttcaacccccccatcattgccagatacatcaggctgcaccccacccactacagcatcaggagcaccctgaggatggagctgatgggctgtgacctgaacagctgcagcatgcccctgggcatggagagcaaggccatctctgatgcccagatcactgccagcagctacttcaccaacatgtttgccacctggagccccagcaaggccaggctgcacctgcagggcaggagcaatgcctggaggccccaggtcaacaaccccaaggagtggctgcaggtggacttccagaagaccatgaaggtgactggggtgaccacccagggggtgaagagcctgctgaccagcatgtatgtgaaggagttcctgatcagcagcagccaggatggccaccagtggaccctgttcttccagaatggcaaggtgaaggtgttccagggcaaccaggacagcttcacccctgtggtgaacagcctggacccccccctgctgaccagatacctgaggattcacccccagagctgggtgcaccagattgccctgaggatggaggtgctgggctgtgaggcccaggacctgtactga

SEQ ID NO: 629 - DNA, 4392 bp, Artificial Sequence
  Description of Artificial Sequence: Synthetic polynucleotide
atgcagattgagctgagcacctgcttcttcctgtgcctgctgaggttctgcttctctgccaccaggagatactacctgggggctgtggagctgagctgggactacatgcagtctgacctgggggagctgcctgtggatgccaggttcccccccagagtgcccaagagcttccccttcaacacctctgtggtgtacaagaagaccctgtttgtggagttcactgaccacctgttcaacattgccaagcccaggcccccctggatgggcctgctgggccccaccatccaggctgaggtgtatgacactgtggtgatcaccctgaagaacatggccagccaccctgtgagcctgcatgctgtgggggtgagctactggaaggcctctgagggggctgagtatgatgaccagaccagccagagggagaaggaggatgacaaggtgttccctgggggcagccacacctatgtgtggcaggtgctgaaggagaatggccccatggcctctgaccccctgtgcctgacctacagctacctgagccatgtggacctggtgaaggacctgaactctggcctgattggggccctgctggtgtgcagggagggcagcctggccaaggagaagacccagaccctgcacaagttcatcctgctgtttgctgtgtttgatgagggcaagagctggcactctgaaaccaagaacagcctgatgcaggacagggatgctgcctctgccagggcctggcccaagatgcacactgtgaatggctatgtgaacaggagcctgcctggcctgattggctgccacaggaagtctgtgtactggcatgtgattggcatgggcaccacccctgaggtgcacagcatcttcctggagggccacaccttcctggtcaggaaccacaggcaggccagcctggagatcagccccatcaccttcctgactgcccagaccctgctgatggacctgggccagttcctgctgttctgccacatcagcagccaccagcatgatggcatggaggcctatgtgaaggtggacagctgccctgaggagccccagctgaggatgaagaacaatgaggaggctgaggactatgatgatgacctgactgactctgagatggatgtggtgaggtttgatgatgacaacagccccagcttcatccagatcaggtctgtggccaagaagcaccccaagacctgggtgcactacattgctgctgaggaggaggactgggactatgcccccctggtgctggcccctgatgacaggagctacaagagccagtacctgaacaatggcccccagaggattggcaggaagtacaagaaggtcaggttcatggcctacactgatgaaaccttcaagaccagggaggccatccagcatgagtctggcatcctgggccccctgctgtatggggaggtgggggacaccctgctgatcatcttcaagaaccaggccagcaggccctacaacatctacccccacggcatcactgatgtgaggcccctgtacagcaggaggctgcccaagggggtgaagcacctgaaggacttccccatcctgcctggggagatcttcaagtacaagtggactgtgactgtggaggatggccccaccaagtctgaccccaggtgcctgaccagatactacagcagctttgtgaacatggagagggacctggcctctggcctgattggccccctgctgatctgctacaaggagtctgtggaccagaggggcaaccagatcatgtctgacaagaggaatgtgatcctgttctctgtgtttgatgagaacaggagctggtacctgactgagaacatccagaggttcctgcccaaccctgctggggtgcagctggaggaccctgagttccaggccagcaacatcatgcacagcatcaatggctatgtgtttgacagcctgcagctgtctgtgtgcctgcatgaggtggcctactggtacatcctgagcattggggcccagactgacttcctgtctgtgttcttctctggctacaccttcaagcacaagatggtgtatgaggacaccctgaccctgttccccttctctggggagactgtgttcatgagcatggagaaccctggcctgtggattctgggctgccacaactctgacttcaggaacaggggcatgactgccctgctgaaagtctccagctgtgacaagaacactggggactactacgaggacagctatgaggacatctctgcctacctgctgagcaagaacaatgccattgagcccaggagcttcagccagaatagcaggcaccccagcaccaggcagaagcagttcaatgccaccaccatcccagagaataccaccctgcagtctgaccaggaggagattgactatgatgacaccatctctgtggagatgaagaaggaggactttgacatctacgacgaggacgagaaccagagccccaggagcttccagaagaagaccaggcactacttcattgctgctgtggagaggctgtgggactatggcatgagcagcagcccccatgtgctgaggaacagggcccagtctggctctgtgccccagttcaagaaggtggtgttccaggagttcactgatggcagcttcacccagcccctgtacagaggggagctgaatgagcacctgggcctgctgggcccctacatcagggctgaggtggaggacaacatcatggtgaccttcaggaaccaggccagcaggccctacagcttctacagcagcctgatcagctatgaggaggaccagaggcagggggctgagcccaggaagaactttgtgaagcccaatgaaaccaagacctacttctggaaggtgcagcaccacatggcccccaccaaggatgagtttgactgcaaggcctgggcctacttctctgatgtggacctggagaaggatgtgcactctggcctgattggccccctgctggtgtgccacaccaacaccctgaaccctgcccatggcaggcaggtgactgtgcaggagtttgccctgttcttcaccatctttgatgaaaccaagagctggtacttcactgagaacatggagaggaactgcagggccccctgcaacatccagatggaggaccccaccttcaaggagaactacaggttccatgccatcaatggctacatcatggacaccctgcctggcctggtgatggcccaggaccagaggatcaggtggtacctgctgagcatgggcagcaatgagaacatccacagcatccacttctctggccatgtgttcactgtgaggaagaaggaggagtacaagatggccctgtacaacctgtaccctggggtgtttgagactgtggagatgctgcccagcaaggctggcatctggagggtggagtgcctgattggggagcacctgcatgctggcatgagcaccctgttcctggtgtacagcaacaagtgccagacccccctgggcatggcctctggccacatcagggacttccagatcactgcctctggccagtatggccagtgggcccccaagctggccaggctgcactactctggcagcatcaatgcctggagcaccaaggagcccttcagctggatcaaggtggacctgctggcccccatgatcatccatggcatcaagacccagggggccaggcagaagttcagcagcctgtacatcagccagttcatcatcatgtacagcctggatggcaagaagtggcagacctacaggggcaacagcactggcaccctgatggtgttctttggcaatgtggacagctctggcatcaagcacaacatcttcaacccccccatcattgccagatacatcaggctgcaccccacccactacagcatcaggagcaccctgaggatggagctgatgggctgtgacctgaacagctgcagcatgcccctgggcatggagagcaaggccatctctgatgcccagatcactgccagcagctacttcaccaacatgtttgccacctggagccccagcaaggccaggctgcacctgcagggcaggagcaatgcctggaggccccaggtcaacaaccccaaggagtggctgcaggtggacttccagaagaccatgaaggtgactggggtgaccacccagggggtgaagagcctgctgaccagcatgtatgtgaaggagttcctgatcagcagcagccaggatggccaccagtggaccctgttcttccagaatggcaaggtgaaggtgttccagggcaaccaggacagcttcacccctgtggtgaacagcctggacccccccctgctgaccagatacctgaggattcacccccagagctgggtgcaccagattgccctgaggatggaggtgctgggctgtgaggcccaggacctgtactga

SEQ ID NO: 630 - DNA, 4392 bp, Artificial Sequence
  Description of Artificial Sequence: Synthetic polynucleotide
atgcagatagagctcagcacctgcttcttcctgtgcctcctcaggttctgcttctctgccaccaggagatactacctgggggctgtggagctgagctgggactacatgcagtctgacctgggggagctgcctgtggacgccaggttcccccccagagtgcccaagagcttccccttcaacacctctgtggtgtacaagaagaccctgtttgtggagttcactgaccacctgttcaacattgccaagcccaggcccccctggatgggcctgctgggccccaccatccaggctgaggtgtatgacactgtggtgatcaccctgaagaacatggccagccaccctgtgagcctgcatgctgtgggggtgagctactggaaggcctctgagggggctgagtatgatgaccagaccagccagagggagaaggaggatgacaaggtgttccctgggggcagccacacctatgtgtggcaggtgctgaaggagaatggccccatggcctctgaccccctgtgcctgacctacagctacctgagccatgtggacctggtgaaggacctgaactctggcctgattggggccctgctggtgtgcagggagggcagcctggccaaggagaagacccagaccctgcacaagttcatcctgctgtttgctgtgtttgatgagggcaagagctggcactctgaaaccaagaacagcctgatgcaggacagggatgctgcctctgccagggcctggcccaagatgcacactgtgaatggctatgtgaacaggagcctgcctggcctgattggctgccacaggaagtctgtgtactggcatgtgattggcatgggcaccacccctgaggtgcacagcatcttcctggagggccacaccttcctggtcaggaaccacaggcaggccagcctggagatcagccccatcaccttcctgactgcccagaccctgctgatggacctgggccagttcctgctgttctgccacatcagcagccaccagcatgatggcatggaggcctatgtgaaggtggacagctgccctgaggagccccagctgaggatgaagaacaatgaggaggctgaggactatgatgatgacctgactgactctgagatggatgtggtgaggtttgatgatgacaacagccccagcttcatccagatcaggtctgtggccaagaagcaccccaagacctgggtgcactacattgctgctgaggaggaggactgggactatgcccccctggtgctggcccctgatgacaggagctacaagagccagtacctgaacaatggcccccagaggattggcaggaagtacaagaaggtcaggttcatggcctacactgatgaaaccttcaagaccagggaggccatccagcatgagtctggcatcctgggccccctgctgtatggggaggtgggggacaccctgctgatcatcttcaagaaccaggccagcaggccctacaacatctacccccacggcatcactgatgtgaggcccctgtacagcaggaggctgcccaagggggtgaagcacctgaaggacttccccatcctgcctggggagatcttcaagtacaagtggactgtgactgtggaggatggccccaccaagtctgaccccaggtgcctgaccagatactacagcagctttgtgaacatggagagggacctggcctctggcctgattggccccctgctgatctgctacaaggagtctgtggaccagaggggcaaccagatcatgtctgacaagaggaatgtgatcctgttctctgtgtttgatgagaacaggagctggtacctgactgagaacatccagaggttcctgcccaaccctgctggggtgcagctggaggaccctgagttccaggccagcaacatcatgcacagcatcaatggctatgtgtttgacagcctgcagctgtctgtgtgcctgcatgaggtggcctactggtacatcctgagcattggggcccagactgacttcctgtctgtgttcttctctggctacaccttcaagcacaagatggtgtatgaggacaccctgaccctgttccccttctctggggagactgtgttcatgagcatggagaaccctggcctgtggattctgggctgccacaactctgacttcaggaacaggggcatgactgccctgctgaaagtctccagctgtgacaagaacactggggactactacgaggacagctatgaggacatctctgcctacctgctgagcaagaacaatgccattgagcccaggagcttcagccagaatagcaggcaccccagcaccaggcagaagcagttcaatgccaccaccatcccagagaataccaccctgcagtctgaccaggaggagattgactatgatgacaccatctctgtggagatgaagaaggaggactttgacatctacgacgaggacgagaaccagagccccaggagcttccagaagaagaccaggcactacttcattgctgctgtggagaggctgtgggactatggcatgagcagcagcccccatgtgctgaggaacagggcccagtctggctctgtgccccagttcaagaaggtggtgttccaggagttcactgatggcagcttcacccagcccctgtacagaggggagctgaatgagcacctgggcctgctgggcccctacatcagggctgaggtggaggacaacatcatggtgaccttcaggaaccaggccagcaggccctacagcttctacagcagcctgatcagctatgaggaggaccagaggcagggggctgagcccaggaagaactttgtgaagcccaatgaaaccaagacctacttctggaaggtgcagcaccacatggcccccaccaaggatgagtttgactgcaaggcctgggcctacttctctgatgtggacctggagaaggatgtgcactctggcctgattggccccctgctggtgtgccacaccaacaccctgaaccctgcccatggcaggcaggtgactgtgcaggagtttgccctgttcttcaccatctttgatgaaaccaagagctggtacttcactgagaacatggagaggaactgcagggccccctgcaacatccagatggaggaccccaccttcaaggagaactacaggttccatgccatcaatggctacatcatggacaccctgcctggcctggtgatggcccaggaccagaggatcaggtggtacctgctgagcatgggcagcaatgagaacatccacagcatccacttctctggccatgtgttcactgtgaggaagaaggaggagtacaagatggccctgtacaacctgtaccctggggtgtttgagactgtggagatgctgcccagcaaggctggcatctggagggtggagtgcctgattggggagcacctgcatgctggcatgagcaccctgttcctggtgtacagcaacaagtgccagacccccctgggcatggcctctggccacatcagggacttccagatcactgcctctggccagtatggccagtgggcccccaagctggccaggctgcactactctggcagcatcaatgcctggagcaccaaggagcccttcagctggatcaaggtggacctgctggcccccatgatcatccatggcatcaagacccagggggccaggcagaagttcagcagcctgtacatcagccagttcatcatcatgtacagcctggatggcaagaagtggcagacctacaggggcaacagcactggcaccctgatggtgttctttggcaatgtggacagctctggcatcaagcacaacatcttcaacccccccatcattgccagatacatcaggctgcaccccacccactacagcatcaggagcaccctgaggatggagctgatgggctgtgacctgaacagctgcagcatgcccctgggcatggagagcaaggccatctctgatgcccagatcactgccagcagctacttcaccaacatgtttgccacctggagccccagcaaggccaggctgcacctgcagggcaggagcaatgcctggaggccccaggtcaacaaccccaaggagtggctgcaggtggacttccagaagaccatgaaggtgactggggtgaccacccagggggtgaagagcctgctgaccagcatgtatgtgaaggagttcctgatcagcagcagccaggatggccaccagtggaccctgttcttccagaatggcaaggtgaaggtgttccagggcaaccaggacagcttcacccctgtggtgaacagcctggacccccccctgctgaccagatacctgaggattcacccccagagctgggtgcaccagattgccctgaggatggaggtgctgggctgtgaggcccaggacctgtactga

SEQ ID NO: 631 - DNA, 4392 bp, Artificial Sequence
  Description of Artificial Sequence: Synthetic polynucleotide
atgcagatagagctcagcacctgcttcttcctgtgcctcctcaggttctgcttctctgccaccaggagatactacctgggggctgtggagctgagctgggactacatgcagtctgacctgggggagctgcctgtggacgccaggttcccccccagagtgcccaagagcttccccttcaacacctctgtggtgtacaagaagaccctgtttgtggagttcactgaccacctgttcaacattgccaagcccaggcccccctggatgggcctgctgggccccaccatccaggctgaggtgtatgacactgtggtgatcaccctgaagaacatggccagccaccctgtgagcctgcatgctgtgggggtgagctactggaaggcctctgagggggctgagtatgatgaccagaccagccagagggagaaggaggatgacaaggtgttccctgggggcagccacacctatgtgtggcaggtgctgaaggagaatggccccatggcctctgaccccctgtgcctgacctacagctacctgagccatgtggacctggtgaaggacctgaactctggcctgattggggccctgctggtgtgcagggagggcagcctggccaaggagaagacccagaccctgcacaagttcatcctgctgtttgctgtgtttgatgagggcaagagctggcactctgaaaccaagaacagcctgatgcaggacagggatgctgcctctgccagggcctggcccaagatgcacactgtgaatggctatgtgaacaggagcctgcctggcctgattggctgccacaggaagtctgtgtactggcatgtgattggcatgggcaccacccctgaggtgcacagcatcttcctggagggccacaccttcctggtcaggaaccacaggcaggccagcctggagatcagccccatcaccttcctgactgcccagaccctgctgatggacctgggccagttcctgctgttctgccacatcagcagccaccagcatgatggcatggaggcctatgtgaaggtggacagctgccctgaggagccccagctgaggatgaagaacaatgaggaggctgaggactatgatgatgacctgactgactctgagatggatgtggtgaggtttgatgatgacaacagccccagcttcatccagatcaggtctgtggccaagaagcaccccaagacctgggtgcactacattgctgctgaggaggaggactgggactatgcccccctggtgctggcccctgatgacaggagctacaagagccagtacctgaacaatggcccccagaggattggcaggaagtacaagaaggtcaggttcatggcctacactgatgaaaccttcaagaccagggaggccatccagcatgagtctggcatcctgggccccctgctgtatggggaggtgggggacaccctgctgatcatcttcaagaaccaggccagcaggccctacaacatctacccccatggcatcactgatgtgaggcccctgtacagcaggaggctgcccaagggggtgaagcacctgaaggacttccccatcctgcctggggagatcttcaagtacaagtggactgtgactgtggaggatggccccaccaagtctgaccccaggtgcctgaccagatactacagcagctttgtgaacatggagagggacctggcctctggcctgattggccccctgctgatctgctacaaggagtctgtggaccagaggggcaaccagatcatgtctgacaagaggaatgtgatcctgttctctgtgtttgatgagaacaggagctggtacctgactgagaacatccagaggttcctgcccaaccctgctggggtgcagctggaggaccctgagttccaggccagcaacatcatgcacagcatcaatggctatgtgtttgacagcctgcagctgtctgtgtgcctgcatgaggtggcctactggtacatcctgagcattggggcccagactgacttcctgtctgtgttcttctctggctacaccttcaagcacaagatggtgtatgaggacaccctgaccctgttccccttctctggggagactgtgttcatgagcatggagaaccctggcctgtggattctgggctgccacaactctgacttcaggaacaggggcatgactgccctgctgaaagtctccagctgtgacaagaacactggggactactatgaggacagctatgaggacatctctgcctacctgctgagcaagaacaatgccattgagcccaggagcttcagccagaatagcaggcaccccagcaccaggcagaagcagttcaatgccaccaccatcccagagaataccaccctgcagtctgaccaggaggagattgactatgatgacaccatctctgtggagatgaagaaggaggactttgacatctacgacgaggacgagaaccagagccccaggagcttccagaagaagaccaggcactacttcattgctgctgtggagaggctgtgggactatggcatgagcagcagcccccatgtgctgaggaacagggcccagtctggctctgtgccccagttcaagaaggtggtgttccaggagttcactgatggcagcttcacccagcccctgtacagaggggagctgaatgagcacctgggcctgctgggcccctacatcagggctgaggtggaggacaacatcatggtgaccttcaggaaccaggccagcaggccctacagcttctacagcagcctgatcagctatgaggaggaccagaggcagggggctgagcccaggaagaactttgtgaagcccaatgaaaccaagacctacttctggaaggtgcagcaccacatggcccccaccaaggatgagtttgactgcaaggcctgggcctacttctctgatgtggacctggagaaggatgtgcactctggcctgattggccccctgctggtgtgccacaccaacaccctgaaccctgcccatggcaggcaggtgactgtgcaggagtttgccctgttcttcaccatctttgatgaaaccaagagctggtacttcactgagaacatggagaggaactgcagggccccctgcaacatccagatggaggaccccaccttcaaggagaactacaggttccatgccatcaatggctacatcatggacaccctgcctggcctggtgatggcccaggaccagaggatcaggtggtacctgctgagcatgggcagcaatgagaacatccacagcatccacttctctggccatgtgttcactgtgaggaagaaggaggagtacaagatggccctgtacaacctgtaccctggggtgtttgagactgtggagatgctgcccagcaaggctggcatctggagggtggagtgcctgattggggagcacctgcatgctggcatgagcaccctgttcctggtgtacagcaacaagtgccagacccccctgggcatggcctctggccacatcagggacttccagatcactgcctctggccagtatggccagtgggcccccaagctggccaggctgcactactctggcagcatcaatgcctggagcaccaaggagcccttcagctggatcaaggtggacctgctggcccccatgatcatccatggcatcaagacccagggggccaggcagaagttcagcagcctgtacatcagccagttcatcatcatgtacagcctggatggcaagaagtggcagacctacaggggcaacagcactggcaccctgatggtgttctttggcaatgtggacagctctggcatcaagcacaacatcttcaacccccccatcattgccagatacatcaggctgcaccccacccactacagcatcaggagcaccctgaggatggagctgatgggctgtgacctgaacagctgcagcatgcccctgggcatggagagcaaggccatctctgatgcccagatcactgccagcagctacttcaccaacatgtttgccacctggagccccagcaaggccaggctgcacctgcagggcaggagcaatgcctggaggccccaggtcaacaaccccaaggagtggctgcaggtggacttccagaagaccatgaaggtgactggggtgaccacccagggggtgaagagcctgctgaccagcatgtatgtgaaggagttcctgatcagcagcagccaggatggccaccagtggaccctgttcttccagaatggcaaggtgaaggtgttccagggcaaccaggacagcttcacccctgtggtgaacagcctggacccccccctgctgaccagatacctgaggattcacccccagagctgggtgcaccagattgccctgaggatggaggtgctgggctgtgaggcccaggacctgtactga

SEQ ID NO: 632 - DNA, 4392 bp, Artificial Sequence
  Description of Artificial Sequence: Synthetic polynucleotide
atgcagatagagctcagcacctgcttcttcctgtgcctcctcaggttctgcttctctgccaccaggagatactacctgggggctgtggagctgagctgggactacatgcagtctgacctgggggagctgcctgtggatgccaggttcccccccagagtgcccaagagcttccccttcaacacctctgtggtgtacaagaagaccctgtttgtggagttcactgaccacctgttcaacattgccaagcccaggcccccctggatgggcctgctgggccccaccatccaggctgaggtgtatgacactgtggtgatcaccctgaagaacatggccagccaccctgtgagcctgcatgctgtgggggtgagctactggaaggcctctgagggggctgagtatgatgaccagaccagccagagggagaaggaggatgacaaggtgttccctgggggcagccacacctatgtgtggcaggtgctgaaggagaatggccccatggcctctgaccccctgtgcctgacctacagctacctgagccatgtggacctggtgaaggacctgaactctggcctgattggggccctgctggtgtgcagggagggcagcctggccaaggagaagacccagaccctgcacaagttcatcctgctgtttgctgtgtttgatgagggcaagagctggcactctgaaaccaagaacagcctgatgcaggacagggatgctgcctctgccagggcctggcccaagatgcacactgtgaatggctatgtgaacaggagcctgcctggcctgattggctgccacaggaagtctgtgtactggcatgtgattggcatgggcaccacccctgaggtgcacagcatcttcctggagggccacaccttcctggtcaggaaccacaggcaggccagcctggagatcagccccatcaccttcctgactgcccagaccctgctgatggacctgggccagttcctgctgttctgccacatcagcagccaccagcatgatggcatggaggcctatgtgaaggtggacagctgccctgaggagccccagctgaggatgaagaacaatgaggaggctgaggactatgatgatgacctgactgactctgagatggatgtggtgaggtttgatgatgacaacagccccagcttcatccagatcaggtctgtggccaagaagcaccccaagacctgggtgcactacattgctgctgaggaggaggactgggactatgcccccctggtgctggcccctgatgacaggagctacaagagccagtacctgaacaatggcccccagaggattggcaggaagtacaagaaggtcaggttcatggcctacactgatgaaaccttcaagaccagggaggccatccagcatgagtctggcatcctgggccccctgctgtatggggaggtgggggacaccctgctgatcatcttcaagaaccaggccagcaggccctacaacatctacccccacggcatcactgatgtgaggcccctgtacagcaggaggctgcccaagggggtgaagcacctgaaggacttccccatcctgcctggggagatcttcaagtacaagtggactgtgactgtggaggatggccccaccaagtctgaccccaggtgcctgaccagatactacagcagctttgtgaacatggagagggacctggcctctggcctgattggccccctgctgatctgctacaaggagtctgtggaccagaggggcaaccagatcatgtctgacaagaggaatgtgatcctgttctctgtgtttgatgagaacaggagctggtacctgactgagaacatccagaggttcctgcccaaccctgctggggtgcagctggaggaccctgagttccaggccagcaacatcatgcacagcatcaatggctatgtgtttgacagcctgcagctgtctgtgtgcctgcatgaggtggcctactggtacatcctgagcattggggcccagactgacttcctgtctgtgttcttctctggctacaccttcaagcacaagatggtgtatgaggacaccctgaccctgttccccttctctggggagactgtgttcatgagcatggagaaccctggcctgtggattctgggctgccacaactctgacttcaggaacaggggcatgactgccctgctgaaagtctccagctgtgacaagaacactggggactactacgaggacagctatgaggacatctctgcctacctgctgagcaagaacaatgccattgagcccaggagcttcagccagaatagcaggcaccccagcaccaggcagaagcagttcaatgccaccaccatcccagagaataccaccctgcagtctgaccaggaggagattgactatgatgacaccatctctgtggagatgaagaaggaggactttgacatctacgacgaggacgagaaccagagccccaggagcttccagaagaagaccaggcactacttcattgctgctgtggagaggctgtgggactatggcatgagcagcagcccccatgtgctgaggaacagggcccagtctggctctgtgccccagttcaagaaggtggtgttccaggagttcactgatggcagcttcacccagcccctgtacagaggggagctgaatgagcacctgggcctgctgggcccctacatcagggctgaggtggaggacaacatcatggtgaccttcaggaaccaggccagcaggccctacagcttctacagcagcctgatcagctatgaggaggaccagaggcagggggctgagcccaggaagaactttgtgaagcccaatgaaaccaagacctacttctggaaggtgcagcaccacatggcccccaccaaggatgagtttgactgcaaggcctgggcctacttctctgatgtggacctggagaaggatgtgcactctggcctgattggccccctgctggtgtgccacaccaacaccctgaaccctgcccatggcaggcaggtgactgtgcaggagtttgccctgttcttcaccatctttgatgaaaccaagagctggtacttcactgagaacatggagaggaactgcagggccccctgcaacatccagatggaggaccccaccttcaaggagaactacaggttccatgccatcaatggctacatcatggacaccctgcctggcctggtgatggcccaggaccagaggatcaggtggtacctgctgagcatgggcagcaatgagaacatccacagcatccacttctctggccatgtgttcactgtgaggaagaaggaggagtacaagatggccctgtacaacctgtaccctggggtgtttgagactgtggagatgctgcccagcaaggctggcatctggagggtggagtgcctgattggggagcacctgcatgctggcatgagcaccctgttcctggtgtacagcaacaagtgccagacccccctgggcatggcctctggccacatcagggacttccagatcactgcctctggccagtatggccagtgggcccccaagctggccaggctgcactactctggcagcatcaatgcctggagcaccaaggagcccttcagctggatcaaggtggacctgctggcccccatgatcatccatggcatcaagacccagggggccaggcagaagttcagcagcctgtacatcagccagttcatcatcatgtacagcctggatggcaagaagtggcagacctacaggggcaacagcactggcaccctgatggtgttctttggcaatgtggacagctctggcatcaagcacaacatcttcaacccccccatcattgccagatacatcaggctgcaccccacccactacagcatcaggagcaccctgaggatggagctgatgggctgtgacctgaacagctgcagcatgcccctgggcatggagagcaaggccatctctgatgcccagatcactgccagcagctacttcaccaacatgtttgccacctggagccccagcaaggccaggctgcacctgcagggcaggagcaatgcctggaggccccaggtcaacaaccccaaggagtggctgcaggtggacttccagaagaccatgaaggtgactggggtgaccacccagggggtgaagagcctgctgaccagcatgtatgtgaaggagttcctgatcagcagcagccaggatggccaccagtggaccctgttcttccagaatggcaaggtgaaggtgttccagggcaaccaggacagcttcacccctgtggtgaacagcctggacccccccctgctgaccagatacctgaggattcacccccagagctgggtgcaccagattgccctgaggatggaggtgctgggctgtgaggcccaggacctgtactga

SEQ ID NO: 633 - DNA, 4392 bp, Artificial Sequence
  Description of Artificial Sequence: Synthetic polynucleotide
atgcagatagagctcagcacctgcttcttcctgtgcctcctcaggttctgcttctctgccaccaggagatactacctgggggctgtggagctgagctgggactacatgcagtctgacctgggggagctgcctgtggacgccaggttcccccccagagtgcccaagagcttccccttcaacacctctgtggtgtacaagaagaccctgtttgtggagttcactgaccacctgttcaacattgccaagcccaggcccccctggatgggcctgctgggccccaccatccaggctgaggtgtatgacactgtggtgatcaccctgaagaacatggccagccaccctgtgagcctgcatgctgtgggggtgagctactggaaggcctctgagggggctgagtatgatgaccagaccagccagagggagaaggaggatgacaaggtgttccctgggggcagccacacctatgtgtggcaggtgctgaaggagaatggccccatggcctctgaccccctgtgcctgacctacagctacctgagccatgtggacctggtgaaggacctgaactctggcctgattggggccctgctggtgtgcagggagggcagcctggccaaggagaagacccagaccctgcacaagttcatcctgctgtttgctgtgtttgatgagggcaagagctggcactctgaaaccaagaacagcctgatgcaggacagggatgctgcctctgccagggcctggcccaagatgcacactgtgaatggctatgtgaacaggagcctgcctggcctgattggctgccacaggaagtctgtgtactggcatgtgattggcatgggcaccacccctgaggtgcacagcatcttcctggagggccacaccttcctggtcaggaaccacaggcaggccagcctggagatcagccccatcaccttcctgactgcccagaccctgctgatggacctgggccagttcctgctgttctgccacatcagcagccaccagcatgatggcatggaggcctatgtgaaggtggacagctgccctgaggagccccagctgaggatgaagaacaatgaggaggctgaggactatgatgatgacctgactgactctgagatggatgtggtgaggtttgatgatgacaacagccccagcttcatccagatcaggtctgtggccaagaagcaccccaagacctgggtgcactacattgctgctgaggaggaggactgggactatgcccccctggtgctggcccctgatgacaggagctacaagagccagtacctgaacaatggcccccagaggattggcaggaagtacaagaaggtcaggttcatggcctacactgatgaaaccttcaagaccagggaggccatccagcatgagtctggcatcctgggccccctgctgtatggggaggtgggggacaccctgctgatcatcttcaagaaccaggccagcaggccctacaacatctacccccacggcatcactgatgtgaggcccctgtacagcaggaggctgcccaagggggtgaagcacctgaaggacttccccatcctgcctggggagatcttcaagtacaagtggactgtgactgtggaggatggccccaccaagtctgaccccaggtgcctgaccagatactacagcagctttgtgaacatggagagggacctggcctctggcctgattggccccctgctgatctgctacaaggagtctgtggaccagaggggcaaccagatcatgtctgacaagaggaatgtgatcctgttctctgtgtttgatgagaacaggagctggtacctgactgagaacatccagaggttcctgcccaaccctgctggggtgcagctggaggaccctgagttccaggccagcaacatcatgcacagcatcaatggctatgtgtttgacagcctgcagctgtctgtgtgcctgcatgaggtggcctactggtacatcctgagcattggggcccagactgacttcctgtctgtgttcttctctggctacaccttcaagcacaagatggtgtatgaggacaccctgaccctgttccccttctctggggagactgtgttcatgagcatggagaaccctggcctgtggattctgggctgccacaactctgacttcaggaacaggggcatgactgccctgctgaaagtctccagctgtgacaagaacactggggactactacgaggacagctatgaggacatctctgcctacctgctgagcaagaacaatgccattgagcccaggagcttcagccagaatagcaggcaccccagcaccaggcagaagcagttcaatgccaccaccatcccagagaataccaccctgcagtctgaccaggaggagattgactatgatgacaccatctctgtggagatgaagaaggaggactttgacatctatgatgaggatgagaaccagagccccaggagcttccagaagaagaccaggcactacttcattgctgctgtggagaggctgtgggactatggcatgagcagcagcccccatgtgctgaggaacagggcccagtctggctctgtgccccagttcaagaaggtggtgttccaggagttcactgatggcagcttcacccagcccctgtacagaggggagctgaatgagcacctgggcctgctgggcccctacatcagggctgaggtggaggacaacatcatggtgaccttcaggaaccaggccagcaggccctacagcttctacagcagcctgatcagctatgaggaggaccagaggcagggggctgagcccaggaagaactttgtgaagcccaatgaaaccaagacctacttctggaaggtgcagcaccacatggcccccaccaaggatgagtttgactgcaaggcctgggcctacttctctgatgtggacctggagaaggatgtgcactctggcctgattggccccctgctggtgtgccacaccaacaccctgaaccctgcccatggcaggcaggtgactgtgcaggagtttgccctgttcttcaccatctttgatgaaaccaagagctggtacttcactgagaacatggagaggaactgcagggccccctgcaacatccagatggaggaccccaccttcaaggagaactacaggttccatgccatcaatggctacatcatggacaccctgcctggcctggtgatggcccaggaccagaggatcaggtggtacctgctgagcatgggcagcaatgagaacatccacagcatccacttctctggccatgtgttcactgtgaggaagaaggaggagtacaagatggccctgtacaacctgtaccctggggtgtttgagactgtggagatgctgcccagcaaggctggcatctggagggtggagtgcctgattggggagcacctgcatgctggcatgagcaccctgttcctggtgtacagcaacaagtgccagacccccctgggcatggcctctggccacatcagggacttccagatcactgcctctggccagtatggccagtgggcccccaagctggccaggctgcactactctggcagcatcaatgcctggagcaccaaggagcccttcagctggatcaaggtggacctgctggcccccatgatcatccatggcatcaagacccagggggccaggcagaagttcagcagcctgtacatcagccagttcatcatcatgtacagcctggatggcaagaagtggcagacctacaggggcaacagcactggcaccctgatggtgttctttggcaatgtggacagctctggcatcaagcacaacatcttcaacccccccatcattgccagatacatcaggctgcaccccacccactacagcatcaggagcaccctgaggatggagctgatgggctgtgacctgaacagctgcagcatgcccctgggcatggagagcaaggccatctctgatgcccagatcactgccagcagctacttcaccaacatgtttgccacctggagccccagcaaggccaggctgcacctgcagggcaggagcaatgcctggaggccccaggtcaacaaccccaaggagtggctgcaggtggacttccagaagaccatgaaggtgactggggtgaccacccagggggtgaagagcctgctgaccagcatgtatgtgaaggagttcctgatcagcagcagccaggatggccaccagtggaccctgttcttccagaatggcaaggtgaaggtgttccagggcaaccaggacagcttcacccctgtggtgaacagcctggacccccccctgctgaccagatacctgaggattcacccccagagctgggtgcaccagattgccctgaggatggaggtgctgggctgtgaggcccaggacctgtactga

SEQ ID NO: 634 - DNA, 43 bp, Artificial Sequence
  Description of Artificial Sequence: Synthetic oligonucleotide
tgtagttaatgattaacccaccatgctacttatggcctgcagg

SEQ ID NO: 635 - DNA, 42 bp, Artificial Sequence
  Description of Artificial Sequence: Synthetic oligonucleotide
tgtagttaatgattaacccaccatgctacttatcgcggccgc

SEQ ID NO: 636 - DNA, 39 bp, Artificial Sequence
  Description of Artificial Sequence: Synthetic oligonucleotide
tgtagttaatgattaacccaccatgctacttatcaattg

SEQ ID NO: 637 - DNA, 42 bp, Artificial Sequence
  Description of Artificial Sequence: Synthetic oligonucleotide
tgtagttaatgattaacccaccatgctacttatcaccaattg

SEQ ID NO: 638 - DNA, 89 bp, Artificial Sequence
  Description of Artificial Sequence: Synthetic oligonucleotide
accttattctactttgattgtgccagacaatgctaccttacgggtaggaatgtagttaatgattaacccaccatgctacttatcaattg

SEQ ID NO: 639 - DNA, 54 bp, Artificial Sequence
  Description of Artificial Sequence: Synthetic oligonucleotide
gctagcccacaatctgcctcccagtagtacatgacattagtttattaatagcct

SEQ ID NO: 640 - DNA, 49 bp, Artificial Sequence
  Description of Artificial Sequence: Synthetic oligonucleotide
tccacaatctgcctcccagtagtacatgacattagtttattaatagcct

SEQ ID NO: 641 - DNA, 537 bp, Artificial Sequence
  Description of Artificial Sequence: Synthetic polynucleotide
agggaggctgctggtaaacattaaccaaggtcacccagttatcagaggagcaaacaggggcaaagtccacagagggaggctgctggtaaacattaaccaaggtcacccagttatcagaggagcaaacaggggcaaagtccacagagggaggctgctggtaaacattaaccaaggtcacccagttatcagaggagcaaacaggggcaaagtccatggtacccactgggaggatgttgagtaagatggaaaactactgatgacccttgcagagacagagtattaggacatgtttgaacaggggccgggcgatcagcaggtagctctagaggatccccgtctgtctgcacatttcgtagagcgagtgttccgatactctaatctccctaggcaaggttcatatttgtgtaggttacttattctccttttgttgactaagtcaataatcagaatcagcaggtttggagtcagcttggcagggatcagcagcctgggttggaaggagggggtataaaagccccttcaccaggagaagccgtc
